(19) United States
(12) Patent Application Publication
(10) Pub. No.: US 2018/0273577 A1
(43) Pub. Date: Sep. 27, 2018

(54) MODULATORS OF KRAS EXPRESSION

(71) Applicant: Ionis Pharmaceuticals, Inc., Carlsbad, CA (US)

(72) Inventors: Alexey REVENKO, San Diego, CA (US); Susan M. FREIER, San Marcos, CA (US); Robert A. MACLEOD, San Diego, CA (US)

(21) Appl. No.: 15/762,616

(22) PCT Filed: Sep. 23, 2016
(86) PCT No.: PCT/US16/53334

§ 371 Date: Mar. 23, 2018

Related U.S. Application Data
(60) Provisional application No. 62/232,120, filed on Sep. 24, 2015.

(51) Int. Cl. C07H 21/04; C12N 15/113; C12Q 1/68; A61K 31/7088

(52) U.S. Cl. CPC C07H 21/04; C12N 15/113; C12Q 1/68; A61K 31/7088; C12N 2310/315; C12N 2310/11; C12N 2310/3525; C12N 2310/3341; C12N 2310/341; C12N 2310/346; C12N 2320/51; C12N 2310/321; C12N 2310/3231

(57) ABSTRACT

The present embodiments provide methods, compounds, and compositions for inhibiting KRAS expression, which can be useful for treating, preventing, or ameliorating a disease associated with KRAS.

### SEQUENCE LISTING

[0001] The present application is being filed along with a Sequence Listing in electronic format. The Sequence Listing is provided as a file entitled BIOL0276WOSEQ_ST25.txt created Aug. 30, 2016, which is 567 kb in size. The information in the electronic format of the sequence listing is incorporated herein by reference in its entirety.

### FIELD

[0002] The present embodiments provide methods, compounds, and compositions for inhibiting KRAS expression, which can be useful for treating, preventing, or ameliorating a disease associated with KRAS.

### BACKGROUND

[0003] Kirsten Rat Sarcoma Viral Oncogene Homologue (KRAS) is one of three RAS protein family members (N, H and K-RAS) that are small membrane bound intracellular GTPase proteins. KRAS cycles between an inactive guanosine diphosphate (GDP)-bound state and an active guanosine triphosphate (GTP)-bound state. The process of exchanging the bound nucleotide is facilitated by guanine nucleotide exchange factors (GEFs) and GTPase activating proteins (GAPs). GEFs promote release of GDP from KRAS in exchange for GTP, resulting in active GTP-bound KRAS. GAPs promote hydrolysis of GTP to GDP, resulting in inactive GDP-bound KRAS. Active GTP-bound KRAS interacts with numerous effector proteins to stimulate signaling pathways regulating various cellular processes including proliferation and survival. Activating mutations render KRAS resistant to GAP-catalyzed hydrolysis of GTP and therefore lock the protein in an activated state.

[0004] KRAS is the most commonly mutated oncogene in human cancer. Approximately 30% of all human cancers have activating KRAS mutations with the highest incidence in colon, lung and pancreatic tumors, where KRAS mutation is also associated with poor prognosis.

### SUMMARY

[0005] Despite the prevalent role of KRAS in several types of cancer, KRAS is considered an “undruggable” target and no inhibitors directly targeting KRAS have yet entered clinical development. The present embodiments provided herein are directed to potent and tolerable compounds and compositions for inhibiting KRAS expression, which can be useful for treating, preventing, ameliorating, or slowing progression of cancer.

### DETAILED DESCRIPTION

[0006] It is to be understood that both the foregoing general description and the following detailed description are exemplary and explanatory only and are not restrictive of the invention, as claimed. Herein, the use of the singular includes the plural unless specifically stated otherwise. As used herein, the use of “or” means “and/or” unless stated otherwise. Furthermore, the use of the term “including” as well as other forms, such as “includes” and “included”, is not limiting. Also, terms such as “element” or “component” encompass both elements and components comprising one unit and elements and components that comprise more than one subunit, unless specifically stated otherwise.

[0007] The section headings used herein are for organizational purposes only and are not to be construed as limiting the subject matter described. All documents, or portions of documents, cited in this application, including, but not limited to, patents, patent applications, articles, books, treatises, and GenBank and NCBI reference sequence records are hereby expressly incorporated by reference for the portions of the document discussed herein, as well as in their entirety.

[0008] It is understood that the sequence set forth in each SEQ ID NO in the examples contained herein is independent of any modification to a sugar moiety, an internucleoside linkage, or a nucleobase. As such, compounds defined by a SEQ ID NO may comprise, independently, one or more modifications to a sugar moiety, an internucleoside linkage, or a nucleobase. Compounds described by ISIS number (ISIS #) indicate a combination of nucleobase sequence, chemical modification, and motif.

[0009] Unless otherwise indicated, the following terms have the following meanings:

[0010] “2′-deoxynucleoside” means a nucleoside comprising 2′-H(H) furanosyl sugar moiety, as found in naturally occurring deoxyribonucleic acids (DNA). In certain embodiments, a 2′-deoxynucleoside may comprise a modified nucleobase or may comprise an RNA nucleobase (e.g., uracil).

[0011] “2′-O-methoxyethyl” (also 2′-MOE and 2′-O(CH₂)₂—OCH₃) refers to an O-methoxy-ethyl modification at the 2′ position of a sugar ring, e.g. a furanose ring. A 2′-O-methoxyethyl modified sugar is a modified sugar.

[0012] “2′-MOE nucleoside” (also 2′-O-methoxyethyl nucleoside) means a nucleoside comprising a 2′-MOE modified sugar moiety.

[0013] “2′-substituted nucleoside” or “2-modified nucleoside” means a nucleoside comprising a 2′-substituted or 2′-modified sugar moiety. As used herein, “2′-substituted” or “2-modified” in reference to a sugar moiety means a sugar moiety comprising a 2′-substituent group other than H or OH. “3′ target site” refers to the nucleotide of a target nucleic acid which is complementary to the 3′-most nucleotide of a particular compound.

[0014] “5′ target site” refers to the nucleotide of a target nucleic acid which is complementary to the 5′-most nucleotide of a particular compound.

[0015] “5-methylcytosine” means a cytosine with a methyl group attached to the 5 position.

[0016] “About” means within ±10% of a value. For example, if it is stated, “the compounds affected at least about 70% inhibition of KRAS”, it is implied that KRAS levels are inhibited within a range of 60% and 80%.

[0017] “Administration” or “administering” refers to routes of introducing a compound or composition provided herein to an individual to perform its intended function. An example of a route of administration that can be used includes, but is not limited to parenteral administration, such as subcutaneous, intravenous, or intramuscular injection or infusion.

[0018] “Administered concomitantly” or “co-administration” means administration of two or more compounds in any manner in which the pharmacological effects of both are manifest in the patient. Concomitant administration does not require that both compounds be administered in a single pharmaceutical composition, in the same dosage form, by the same route of administration, or at the same time. The effects of both compounds need not manifest themselves at the same time. The effects need only be overlapping for a period of time and need not be coextensive. Concomitant administration or co-administration encompasses administration in parallel or sequentially.

[0019] “Amelioration” refers to a lessening of at least one indicator, sign, or symptom of an associated disease, disorder, or condition. In certain embodiments, amelioration includes a delay or slowing in the progression of one or more indicators of a condition or disease. The severity of indicators may be determined by subjective or objective measures, which are known to those skilled in the art.

[0020] “Animal” refers to a human or non-human animal, including, but not limited to, mice, rats, rabbits, dogs, cats, pigs, and non-human primates, including, but not limited to, monkeys and chimpanzees.

[0021] “Antisense activity” means any detectable or measurable activity attributable to the hybridization of an antisense compound to its target nucleic acid. In certain embodiments, antisense activity is a decrease in the amount or expression of a target nucleic acid or protein encoded by such target nucleic acid compared to target nucleic acid levels or target protein levels in the absence of the antisense compound to the target.

[0022] “Antisense compound” means a compound comprising an antisense oligonucleotide and optionally one or more additional features, such as a conjugate group or terminal group. Examples of antisense compounds include single-stranded and double-stranded compounds, such as, antisense oligonucleotides, ribozymes, siRNAs, shRNAs, ssRNAs, and occupancy-based compounds.

[0023] “Antisense inhibition” means reduction of target nucleic acid levels in the presence of an antisense compound complementary to a target nucleic acid compared to target nucleic acid levels in the absence of the antisense compound.

[0024] “Antisense mechanisms” are all those mechanisms involving hybridization of a compound with target nucleic acid, wherein the outcome or effect of the hybridization is either target degradation or target occupancy with concomitant stalling of the cellular machinery involving, for example, transcription or splicing.

[0025] “Antisense oligonucleotide” means an oligonucleotide having a nucleobase sequence that is complementary to a target nucleic acid or region or segment thereof. In certain embodiments, an antisense oligonucleotide is specifically hybridizable to a target nucleic acid or region or segment thereof.

[0026] “Bicyclic nucleoside” or “BNA” means a nucleoside comprising a bicyclic sugar moiety. As used herein, “bicyclic sugar” or “bicyclic sugar moiety” means a modified sugar moiety comprising two rings, wherein the second ring is formed via a bridge connecting two of the atoms in the first ring thereby forming a bicyclic structure. In certain embodiments, the first ring of the bicyclic sugar moiety is a furanosyl moiety.

[0027] In certain embodiments, the bicyclic sugar moiety does not comprise a furanosyl moiety.

[0028] “Branching group” means a group of atoms having at least 3 positions that are capable of forming covalent linkages to at least 3 groups. In certain embodiments, a branching group provides a plurality of reactive sites for connecting tethered ligands to an oligonucleotide via a conjugate linker and/or a cleavable moiety.

[0029] “Cell-targeting moiety” means a conjugate group or portion of a conjugate group that is capable of binding to a particular cell type or particular cell types.

[0030] “cEt” or “constrained ethyl” means a bicyclic furanosyl sugar moiety comprising a bridge connecting the 4′-carbon and the 2′-carbon, wherein the bridge has the formula: 4′-CH(CH₃)—O-2′.

[0031] “Chemical modification” in a compound describes the substitutions or changes through chemical reaction, of any of the units 3n the compound, “Modified nucleoside” means a nucleoside having, independently, a modified sugar moiety and/or modified nucleobase. “Modified oligonucleotide” means an oligonucleotide comprising at least one modified internucleoside linkage, a modified sugar, and/or a modified nucleobase.

[0032] “Chemically distinct region” refers to a region of an antisense compound that is in some way chemically different than another region of the same antisense compound. For example, a region having 2′-O-methoxyethyl nucleotides is chemically distinct from a region having nucleotides without 2′-O-methoxyethyl modifications.

[0033] “Chimeric antisense compounds” means antisense compounds that have at least 2 chemically distinct regions, each position having a plurality of subunits.

[0034] “Cleavable bond” means any chemical bond capable of being split. In certain embodiments, a cleavable bond is selected from among: an amide, a polyamide, an ester, an ether, one or both esters of a phosphodiester, a phosphate ester, a carbamate, a di-sulfide, or a peptide.

[0035] “Cleavable moiety” means a bond or group of atoms that is cleaved under physiological conditions, for example, inside a cell, an animal, or a human.

[0036] “Constrained ethyl nucleoside” (also cEt nucleoside) means a nucleoside comprising a bicyclic sugar moiety comprising a 4′-CH(CH₃)—O-2′ bridge.

[0037] “Complementary” in reference to an oligonucleotide means the nucleobase sequence of such oligonucleotide or one or more regions thereof matches the nucleobase sequence of another oligonucleotide or nucleic acid or one or more regions thereof when the two nucleobase sequences are aligned in opposing directions. Nucleobase matches or complementary nucleobases, as described herein, are limited to adenine (A) and thymine (T), adenine (A) and uracil (U), cytosine (C) and guanine (G), and 5-methyl cytosine (mC) and guanine (G) unless otherwise specified. Complementary oligonucleotides and/or nucleic acids need not have nucleobase complementarity at each nucleoside and may include one or more nucleobase mismatches. By contrast, “fully complementary” or “100% complementary” in reference to oligonucleotides means that such oligonucleotides have nucleobase matches at each nucleoside without any nucleobase mismatches.

[0038] “Conjugate group” means a group of atoms that is attached to a parent compound, e.g., an oligonucleotide.

[0039] “Conjugate linker” means a group of atoms that connects a conjugate group to a parent compound, e.g., an oligonucleotide.

[0040] “Contiguous” in the context of an oligonucleotide refers to nucleosides, nucleobases, sugar moieties, or internucleoside linkages that are immediately adjacent to each other. For example, “contiguous nucleobases” means nucleobases that are immediately adjacent to each other.

[0041] “Designing” or “Designed to” refer to the process of designing an oligomeric compound that specifically hybridizes with a selected nucleic acid molecule.

[0042] “Differently modified” mean chemical modifications or chemical substituents that are different from one another, including absence of modifications. Thus, for example, a MOE nucleoside and an unmodified DNA nucleoside are “differently modified,” even though the DNA nucleoside is unmodified. Likewise, DNA and RNA are “differently modified,” even though both are naturally-occurring unmodified nucleosides. Nucleosides that are the same but for comprising different nucleobases are not differently modified. For example, a nucleoside comprising a 2′-OMe modified sugar and an unmodified adenine nucleobase and a nucleoside comprising a 2′-OMe modified sugar and an unmodified thymine nucleobase are not differently modified.

[0043] “Dose” means a specified quantity of a pharmaceutical agent provided in a single administration, or in a specified time period. In certain embodiments, a dose may be administered in two or more boluses, tablets, or injections. For example, in certain embodiments, where subcutaneous administration is desired, the desired dose may require a volume not easily accommodated by a single injection. In such embodiments, two or more injections may be used to achieve the desired dose. In certain embodiments, a dose may be administered in two or more injections to minimize injection site reaction in an individual. In other embodiments, the pharmaceutical agent is administered by infusion over an extended period of time or continuously. Doses may be stated as the amount of pharmaceutical agent per hour, day, week or month.

[0044] “Dosing regimen” is a combination of doses designed to achieve one or more desired effects.

[0045] “Double-stranded antisense compound” means an antisense compound comprising two oligomeric compounds that are complementary to each other and form a duplex, and wherein one of the two said oligomeric compounds comprises an antisense oligonucleotide.

[0046] “Effective amount” means the amount of compound sufficient to effectuate a desired physiological outcome in an individual in need of the agent. The effective amount may vary among individuals depending on the health and physical condition of the individual to be treated, the taxonomic group of the individuals to be treated, the formulation of the composition, assessment of the individual's medical condition, and other relevant factors.

[0047] “Efficacy” means the ability to produce a desired effect.

[0048] “Expression” includes all the functions by which a gene's coded information is converted into structures present and operating in a cell. Such structures include, but are not limited to the products of transcription and translation.

[0049] “Fully modified” in reference to an oligonucleotide means a modified oligonucleotide in which each nucleoside is modified. “Uniformly modified” in reference to an oligonucleotide means a fully modified oligonucleotide in which at least one modification of each nucleoside is the same. For example, the nucleosides of a uniformly modified oligonucleotide can each have a 2′-MOE modification but different nucleobase modifications, and the internucleoside linkages may be different.

[0050] “Gapmer” means a chimeric antisense compound in which an internal region having a plurality of nucleosides that support RNase H cleavage is positioned between external regions having one or more nucleosides, wherein the nucleosides comprising the internal region are chemically distinct from the nucleoside or nucleosides comprising the external regions. The internal region may be referred to as the “gap” and the external regions may be referred to as the “wings.”

[0051] “Hybridization” means the annealing of complementary oligonucleotides and/or nucleic acid molecules. In certain embodiments, complementary nucleic acid molecules include, but are not limited to, an antisense compound and a nucleic acid target. In certain embodiments, complementary nucleic acid molecules include, but are not limited to, an antisense oligonucleotide and a nucleic acid target.

[0052] “Immediately adjacent” means there are no intervening elements between the immediately adjacent elements of the same kind (e.g. no intervening nucleobases between the immediately adjacent nucleobases).

[0053] “Individual” means a human or non-human animal selected for treatment or therapy.

[0054] “Inhibiting the expression or activity” refers to a reduction or blockade of the expression or activity relative to the expression of activity in an untreated or control sample and does not necessarily indicate a total elimination of expression or activity.

[0055] “Internucleoside linkage” means a group or bond that forms a covalent linkage between adjacent nucleosides in an oligonucleotide. As used herein “modified internucleoside linkage” means any internucleoside linkage other than a naturally occurring, phosphate internucleoside linkage.

[0056] “KRAS” means any nucleic acid or protein of KRAS. “KRAS nucleic acid” means any nucleic acid encoding KRAS. For example, in certain embodiments, a KRAS nucleic acid includes a DNA sequence encoding KRAS, an RNA sequence transcribed from DNA encoding KRAS (including genomic DNA comprising introns and exons), including a non-protein encoding (i.e. non-coding) RNA sequence, and an mRNA sequence encoding KRAS. “KRAS mRNA” means an mRNA encoding a KRAS protein. “KRAS,” “K-ras,” “kras,” “k-ras,” “Ki-ras,” and “ki-ras” can be used interchangably without capitalizaiton or italicization of their spelling referring to nucleic acid or protein in a mutually exclusive manner unless specifically indicated to the contrary.

[0057] “KRAS specific inhibitor” refers to any agent capable of specifically inhibiting KRAS RNA and/or KRAS protein expression or activity at the molecular level. For example, KRAS specific inhibitors include nucleic acids (including antisense compounds), peptides, antibodies, small molecules, and other agents capable of inhibiting the expression of KRAS RNA and/or KRAS protein.

[0058] “Lengthened antisense oligonucleotides” are those that have one or more additional nucleosides relative to an antisense oligonucleotide disclosed herein, e.g. a parent oligonucleotide.

[0059] “Linearly modified sugar” or “linearly modified sugar moiety” means a modified sugar moiety that comprises an acyclic or non-bridging modification. Such linear modifications are distinct from bicyclic sugar modifications.

[0060] “Linked nucleosides” means adjacent nucleosides linked together by an internucleoside linkage.

[0061] “Mismatch” or “non-complementary” means a nucleobase of a first oligonucleotide that is not complementary to the corresponding nucleobase of a second oligonucleotide or target nucleic acid when the first and second oligonucleotides are aligned. For example, nucleobases including but not limited to a universal nucleobase, inosine, and hypoxanthine, are capable of hybridizing with at least one nucleobase but are still mismatched or non-complementary with respect to nucleobase to which it hybridized. As another example, a nucleobase of a first oligonucleotide that is not capable of hybridizing to the corresponding nucleobase of a second oligonucleotide or target nucleic acid when the first and second oligonucleotides are aligned is a mismatch or non-complementary nucleobase.

[0062] “Modulating” refers to changing or adjusting a feature in a cell, tissue, organ or organism. For example, modulating KRAS RNA can mean to increase or decrease the level of KRAS RNA and/or KRAS protein in a cell, tissue, organ or organism. A “modulator” effects the change in the cell, tissue, organ or organism. For example, a KRAS antisense compound can be a modulator that decreases the amount of KRAS RNA and/or KRAS protein in a cell, tissue, organ or organism.

[0063] “Monomer” refers to a single unit of an oligomer. Monomers include, but are not limited to, nucleosides and nucleotides.

[0064] “Motif” means the pattern of unmodified and/or modified sugar moieties, nucleobases, and/or internucleoside linkages, in an oligonucleotide.

[0065] “Natural” or “naturally occurring” means found in nature.

[0066] “Nucleic acid” refers to molecules composed of monomeric nucleotides. A nucleic acid includes, but is not limited to, ribonucleic acids (RNA), deoxyribonucleic acids (DNA), single-stranded nucleic acids, and double-stranded nucleic acids.

[0067] “Nucleobase” means a heterocyclic moiety capable of pairing with a base of another nucleic acid.

[0068] “Nucleobase sequence” means the order of contiguous nucleobases independent of any sugar, linkage, and/or nucleobase modification.

[0069] “Nucleoside” means a compound comprising a nucleobase and a sugar moiety. The nucleobase and sugar moiety are each, independently, unmodified or modified.

[0070] “Oligomeric compound” means a compound comprising a single oligonucleotide and optionally one or more additional features, such as a conjugate group or terminal group.

[0071] “Oligonucleotide” means a polymer of linked nucleosides each of which can be modified or unmodified, independent one from another.

[0072] “Parent oligonucleotide” means an oligonucleotide whose sequence is used as the basis of design for more oligonucleotides of similar sequence but with different lengths, motifs, and/or chemistries. The newly designed oligonucleotides may have the same or overlapping sequence as the parent oligonucleotide.

[0073] “Parenteral administration” means administration through injection or infusion. Parenteral administration includes subcutaneous administration, intravenous administration, intramuscular administration, intraarterial administration, intraperitoneal administration, or intracranial administration, e.g. intrathecal or intracerebroventricular administration.

[0074] “Pharmaceutically acceptable carrier or diluent” means any substance suitable for use in administering to an animal. For example, a pharmaceutically acceptable carrier can be a sterile aqueous solution, such as PBS or water-for-injection. As used herein “pharmaceutically acceptable salts” means physiologically and pharmaceutically acceptable salts of compounds, such as oligomeric compounds, i.e., salts that retain the desired biological activity of the parent compound and do not impart undesired toxicological effects thereto.

[0075] “Pharmaceutical agent” means a compound that provides a therapeutic benefit when administered to an individual.

[0076] “Pharmaceutical composition” means a mixture of substances suitable for administering to an individual. For example, a pharmaceutical composition may comprise one or more compounds or salt thereof and a sterile aqueous solution.

[0077] “Phosphorothioate linkage” means a modified internucleoside linkage between nucleosides where the phosphodiester bond is modified by replacing one of the non-bridging oxygen atoms with a sulfur atom.

[0078] “Phosphorus moiety” means a group of atoms comprising a phosphorus atom. In certain embodiments, a phosphorus moiety comprises a mono-, di-, or tri-phosphate, or phosphorothioate.

[0079] “Portion” means a defined number of contiguous (i.e., linked) nucleobases of a nucleic acid. In certain embodiments, a portion is a defined number of contiguous nucleobases of a target nucleic acid. In certain embodiments, a portion is a defined number of contiguous nucleobases of an oligomeric compound.

[0080] “Prodrug” means a form of a compound which, when administered to an individual, is metabolized to another form. In certain embodiments, the metabolized form is the active, or more active, form of the compound (e.g., drug).

[0081] “Prophylactically effective amount” refers to an amount of a pharmaceutical agent that provides a prophylactic or preventative benefit to an animal.

[0082] “Region” is defined as a portion of the target nucleic acid having at least one identifiable structure, function, or characteristic.

[0083] “RNAi compound” means a compound that acts, at least in part, through RISC or Ago2, but not through RNase H, to modulate a target nucleic acid and/or protein encoded by a target nucleic acid. RNAi compounds include, but are not limited to double-stranded siRNA, single-stranded RNA (ssRNA), and microRNA, including microRNA mimics.

[0084] “Segments” are defined as smaller or sub-portions of regions within a nucleic acid.

[0085] “Side effects” means physiological disease and/or conditions attributable to a treatment other than the desired effects. In certain embodiments, side effects include injection site reactions, liver function test abnormalities, renal function abnormalities, liver toxicity, renal toxicity, central nervous system abnormalities, myopathies, and malaise. For example, increased aminotransferase levels in serum may indicate liver toxicity or liver function abnormality. For example, increased bilirubin may indicate liver toxicity or liver function abnormality.

[0086] “Single-stranded” in reference to a compound means the compound has only one oligonucleotide. “Self-complementary” means an oligonucleotide that at least partially hybridizes to itself. A compound consisting of one oligonucleotide, wherein the oligonucleotide of the compound is self-complementary, is a single-stranded compound. A single-stranded antisense compound may be capable of binding to a complementary compound to form a duplex.

[0087] “Sites,” as used herein, are defined as unique nucleobase positions within a target nucleic acid.

[0088] “Specifically hybridizable” refers to an antisense compound having a sufficient degree of complementarity between an antisense oligonucleotide and a target nucleic acid to induce a desired effect, while exhibiting minimal or no effects on non-target nucleic acids. In certain embodiments, specific hybridization occurs under physiological conditions.

[0089] “Specifically inhibit” a target nucleic acid means to reduce or block expression of the target nucleic acid while exhibiting fewer, minimal, or no effects on non-target nucleic acids reduction and does not necessarily indicate a total elimination of the target nucleic acid's expression.

[0090] “Sugar moiety” means a group of atoms that can link a nucleobase to another group, such as an internucleoside linkage, conjugate group, or terminal group. In certain embodiments, a sugar moiety is attached to a nucleobase to form a nucleoside. As used herein, “unmodified sugar moiety” or “unmodified sugar” means a 2′-OH(H) furanosyl moiety, as found in RNA, or a 2′-H(H) moiety, as found in DNA. Unmodified sugar moieties have one hydrogen at each of the 1′, 3′, and 4′ positions, an oxygen at the 3′ position, and two hydrogens at the 5′ position. As used herein, “modified sugar moiety” or “modified sugar” means a modified furanosyl moiety comprising a non-hydrogen substituent in place of at least one hydrogen of an unmodified sugar moiety, or a sugar surrogate. In certain embodiments, a modified sugar moiety is a 2′-substituted sugar moiety. Such modified sugar moieties include bicyclic sugars and linearly modified sugars.

[0091] “Sugar surrogate” means a modified sugar moiety having other than a furanosyl moiety that can link a nucleobase to another group, such as an internucleoside linkage, conjugate group, or terminal group. Modified nucleosides comprising sugar surrogates can be incorporated into one or more positions within an oligonucleotide. In certain embodiments, such oligonucleotides are capable of hybridizing to complementary oligomeric compounds or nucleic acids.

[0092] “Target gene” refers to a gene encoding a target.

[0093] “Target nucleic acid,” “target RNA,” “target RNA transcript” and “nucleic acid target” all mean a nucleic acid capable of being targeted by antisense compounds.

[0094] “Target region” means a portion of a target nucleic acid to which one or more antisense compounds is targeted.

[0095] “Target segment” means the sequence of nucleotides of a target nucleic acid to which an antisense compound is targeted. “5′ target site” refers to the 5′-most nucleotide of a target segment. “3′ target site” refers to the 3′-most nucleotide of a target segment.

[0096] “Terminal group” means a chemical group or group of atoms that is covalently linked to a terminus of an oligonucleotide.

[0097] “Therapeutically effective amount” means an amount of a compound, pharmaceutical agent, or composition that provides a therapeutic benefit to an individual.

[0098] “Treat” refers to administering a compound or pharmaceutical composition to an animal in order to effect an alteration or improvement of a disease, disorder, or condition in the animal.

### Certain Embodiments

[0099] Certain embodiments provide methods, compounds and compositions for inhibiting KRAS expression.

[0100] Certain embodiments provide compounds targeted to a KRAS nucleic acid. In certain embodiments, the KRAS nucleic acid has the sequence set forth in GENBANK Accession No. NM_004985.4 (herein incorporated by reference, disclosed herein as SEQ ID NO: 1); GENBANK Accession No. NT_009714.17_TRUNC_18116000_18166000_COMP (herein incorporated by reference, disclosed herein as SEQ ID NO: 2), or GENBANK Accession No. NM_033360.3 (herein incorporated by reference, disclosed herein as SEQ ID NO: 3). In certain embodiments, the compound is a single-stranded oligonucleotide. In certain embodiments, the compound is double-stranded.

[0101] Certain embodiments provide a compound comprising a modified oligonucleotide consisting of 8 to 80 linked nucleosides and having a nucleobase sequence comprising at least 8 contiguous nucleobases of any of the nucleobase sequences of SEQ ID NOs: 13-2190. In certain embodiments, the compound is a single-stranded oligonucleotide. In certain embodiments, the compound is double-stranded. In certain embodiments, the modified oligonucleotide consists of 10 to 30 linked nucleosides.

[0102] Certain embodiments provide a compound comprising a modified oligonucleotide consisting of 9 to 80 linked nucleosides and having a nucleobase sequence comprising at least 9 contiguous nucleobases of any of the nucleobase sequences of SEQ ID NOs: 13-2190. In certain embodiments, the compound is a single-stranded oligonucleotide. In certain embodiments, the compound is double-stranded. In certain embodiments, the modified oligonucleotide consists of 10 to 30 linked nucleosides.

[0103] Certain embodiments provide a compound comprising a modified oligonucleotide consisting of 10 to 80 linked nucleosides and having a nucleobase sequence comprising at least 10 contiguous nucleobases of any of the nucleobase sequences of SEQ ID NOs: 13-2190. In certain embodiments, the compound is a single-stranded oligonucleotide. In certain embodiments, the compound is double-stranded. In certain embodiments, the modified oligonucleotide consists of 10 to 30 linked nucleosides.

[0104] Certain embodiments provide a compound comprising a modified oligonucleotide consisting of 11 to 80 linked nucleosides and having a nucleobase sequence comprising at least 11 contiguous nucleobases of any of the nucleobase sequences of SEQ ID NOs: 13-2190. In certain embodiments, the compound is a single-stranded oligonucleotide. In certain embodiments, the compound is double-stranded. In certain embodiments, the modified oligonucleotide consists of 11 to 30 linked nucleosides.

[0105] Certain embodiments provide a compound comprising a modified oligonucleotide consisting of 12 to 80 linked nucleosides and having a nucleobase sequence comprising at least 12 contiguous nucleobases of any of the nucleobase sequences of SEQ ID NOs: 13-2190. In certain embodiments, the compound is a single-stranded oligonucleotide. In certain embodiments, the compound is double-stranded. In certain embodiments, the modified oligonucleotide consists of 12 to 30 linked nucleosides.

[0106] Certain embodiments provide a compound comprising a modified oligonucleotide consisting of 16 to 80 linked nucleosides and having a nucleobase sequence comprising the nucleobase sequence of any one of SEQ ID NOs: 13-2190. In certain embodiments, the compound is a single-stranded oligonucleotide. In certain embodiments, the compound is double-stranded. In certain embodiments, the modified oligonucleotide consists of 16 to 30 linked nucleosides.

[0107] Certain embodiments provide a compound comprising a modified oligonucleotide consisting of the nucleobase sequence of any one of SEQ ID NOs: 13-2190. In certain embodiments, the compound is a single-stranded oligonucleotide. In certain embodiments, the compound is double-stranded.

[0108] In certain embodiments, a compound comprises or consists of a modified oligonucleotide consisting of 8 to 80 linked nucleosides having at least an 8, 9, 10, 11, 12, 13, 14, 15, or 16 contiguous nucleobase portion complementary to an equal length portion within nucleotides 463-478, 877-892, 1129-1144, 1313-1328, 1447-1462, 1686-1701, 1690-1705, 1778-1793, 1915-1930, 1919-1934, 1920-1935, 2114-2129, 2115-2130, 2461-2476, 2462-2477, 2463-2478, 4035-4050 of SEQ ID NO: 1. In certain embodiments, the modified oligonucleotide consists of 10 to 30 linked nucleosides.

[0109] In certain embodiments, a compound comprises or consists of a modified oligonucleotide consisting of 8 to 80 linked nucleosides complementary within nucleotides 463-478, 877-892, 1129-1144, 1313-1328, 1447-1462, 1686-1701, 1690-1705, 1778-1793, 1915-1930, 1919-1934, 1920-1935, 2114-2129, 2115-2130, 2461-2476, 2462-2477, 2463-2478, 4035-4050 of SEQ ID NO: 1. In certain embodiments, the modified oligonucleotide consists of 10 to 30 linked nucleosides.

[0110] In certain embodiments, a compound comprises or consists of a modified oligonucleotide consisting of 8 to 80 linked nucleosides having a nucleobase sequence comprising at least an 8, 9, 10, 11, 12, 13, 14, 15, or 16 contiguous nucleobase portion of any one of SEQ ID NOs: 239, 272, 569, 607, 615, 621, 640, 655, 678, 715, 790, 804, 854, 1028, 2130, 2136, 2142, 2154, and 2158. In certain embodiments, the modified oligonucleotide consists of 10 to 30 linked nucleosides.

[0111] In certain embodiments, a compound comprises or consists of a modified oligonucleotide consisting of 8 to 80 linked nucleosides having a nucleobase sequence comprising any one of SEQ ID NOs: 239, 272, 569, 607, 615, 621, 640, 655, 678, 715, 790, 804, 854, 1028, 2130, 2136, 2142, 2154, and 2158. In certain embodiments, the modified oligonucleotide consists of 10 to 30 linked nucleosides.

[0112] In certain embodiments, a compound comprises or consists of a modified oligonucleotide having a nucleobase sequence consisting of any one of SEQ ID NOs: 239, 272, 569, 607, 615, 621, 640, 655, 678, 715, 790, 804, 854, 1028, 2130, 2136, 2142, 2154, and 2158.

[0113] In certain embodiments, a compound comprises or consists of ISIS #651530, 651987, 695785, 695823, 651555, 651587, 695980, 695995, 696018, 696044, 716600, 746275, 716655, 716772, 740179, 740191, 740201, 740223, or 740233. Out of over 2,000 antisense oligonucleotides that were screened as described in the Examples section below, ISIS #651530, 651987, 695785, 695823, 651555, 651587, 695980, 695995, 696018, 696044, 716600, 746275, 716655, 716772, 740179, 740191, 740201, 740223, and 740233 emerged as the top lead compounds in terms of potency and/or tolerability.

[0114] In certain embodiments, any of the foregoing oligonucleotides comprises at least one modified internucleoside linkage, at least one modified sugar, and/or at least one modified nucleobase.

[0115] In certain embodiments, any of the foregoing oligonucleotides comprises at least one modified sugar. In certain embodiments, at least one modified sugar comprises a 2′-O-methoxyethyl group. In certain embodiments, at least one modified sugar is a bicyclic sugar, such as a 4′-CH(CH₃)—O-2′ group, a 4′-CH₂-O-2′ group, or a 4′-(CH₂)₂-O-2′group.

[0116] In certain embodiments, the modified oligonucleotide comprises at least one modified internucleoside linkage, such as a phosphorothioate internucleoside linkage.

[0117] In certain embodiments, any of the foregoing oligonucleotides comprises at least one modified nucleobase, such as 5-methylcytosine.

[0118] In certain embodiments, any of the foregoing oligonucleotides comprises:
[0119] a gap segment consisting of linked deoxynucleosides;
[0120] a 5′ wing segment consisting of linked nucleosides; and
[0121] a 3′ wing segment consisting of linked nucleosides;

[0122] wherein the gap segment is positioned between the 5′ wing segment and the 3′ wing segment and wherein each nucleoside of each wing segment comprises a modified sugar. In certain embodiments, the oligonucleotide consists of 16 to 80 linked nucleosides having a nucleobase sequence comprising the sequence recited in any one of SEQ ID NOs: 13-2190. In certain embodiments, the oligonucleotide consists of 16 to 80 linked nucleosides having a nucleobase sequence comprising the sequence recited in any one of SEQ ID NOs: 239, 272, 569, 607, 615, 621, 640, 655, 678, 715, 790, 804, 854, 1028, 2130, 2136, 2142, 2154, and 2158. In certain embodiments, the oligonucleotide consists of 16 to 30 linked nucleosides having a nucleobase sequence comprising the sequence recited in any one of SEQ ID NOs: 239, 272, 569, 607, 615, 621, 640, 655, 678, 715, 790, 804, 854, 1028, 2130, 2136, 2142, 2154, and 2158. In certain embodiments, the oligonucleotide consists of 16 linked nucleosides having a nucleobase sequence consisting of the sequence recited in any one of SEQ ID NOs: 239, 272, 569, 607, 615, 621, 640, 655, 678, 715, 790, 804, 854, 1028, 2130, 2136, 2142, 2154, and 2158.

[0123] In certain embodiments, a compound comprises or consists of a modified oligonucleotide consisting of 16-80 linked nucleobases having a nucleobase sequence comprising or consisting of the sequence recited in any one of SEQ ID NOs: 239, 272, 569, 607, 615, 621, 640, 655, 678, 715, 790, and 854, wherein the modified oligonucleotide comprises a gap segment consisting of ten linked deoxynucleosides;

[0124] a 5′ wing segment consisting of three linked nucleosides; and

[0125] a 3′ wing segment consisting of three linked nucleosides;

[0126] wherein the gap segment is positioned between the 5′ wing segment and the 3′ wing segment, wherein each nucleoside of each wing segment comprises a constrained ethyl (cEt) nucleoside; wherein each internucleoside linkage is a phosphorothioate linkage and wherein each cytosine is a 5-methylcytosine. In certain embodiments, the modified oligonucleotide consists of 16-30 linked nucleosides. In certain embodiments, the modified oligonucleotide consists of 16 linked nucleosides.

[0127] In certain embodiments, a compound comprises or consists of a modified oligonucleotide consisting of 16-80 linked nucleobases having a nucleobase sequence comprising or consisting of the sequence recited in SEQ ID NO: 2130, wherein the modified oligonucleotide comprises

[0128] a gap segment consisting of nine linked deoxynucleosides;

[0129] a 5′ wing segment consisting of one linked nucleoside; and

[0130] a 3′ wing segment consisting of six linked nucleosides;

[0131] wherein the gap segment is positioned between the 5′ wing segment and the 3′ wing segment; wherein the 5′ wing segment comprises a cEt nucleoside; wherein the 3′ wing segment comprises a cEt nucleoside, a 2′-O-methoxyethyl nucleoside, a cEt nucleoside, a 2′-O-methoxyethyl nucleoside, a cEt nucleoside, and 2′-O-methoxyethyl nucleoside in the 5′ to 3′ direction; wherein each internucleoside linkage is a phosphorothioate linkage; and wherein each cytosine is a 5-methylcytosine. In certain embodiments, the modified oligonucleotide consists of 16-30 linked nucleosides. In certain embodiments, the modified oligonucleotide consists of 16 linked nucleosides.

[0132] In certain embodiments, a compound comprises or consists of a modified oligonucleotide consisting of 16-80 linked nucleobases having a nucleobase sequence comprising or consisting of the sequence recited in any one of SEQ ID NOs: 804, 1028, and 2136, wherein the modified oligonucleotide comprises

[0133] a gap segment consisting of ten linked deoxynucleosides;

[0134] a 5′ wing segment consisting of two linked nucleosides; and

[0135] a 3′ wing segment consisting of four linked nucleosides;

[0136] wherein the gap segment is positioned between the 5′ wing segment and the 3′ wing segment; wherein the 5′ wing segment comprises a cEt nucleoside and a cEt nucleoside in the 5′ to 3′ direction; wherein the 3′ wing segment comprises a cEt nucleoside, a 2′-O-methoxyethyl nucleoside, a cEt nucleoside, and a 2′-O-methoxyethyl nucleoside in the 5′ to 3′ direction; wherein each internucleoside linkage is a phosphorothioate linkage; and wherein each cytosine is a 5-methylcytosine. In certain embodiments, the modified oligonucleotide consists of 16-30 linked nucleosides. In certain embodiments, the modified oligonucleotide consists of 16 linked nucleosides.

[0137] In certain embodiments, a compound comprises or consists of a modified oligonucleotide consisting of 16-80 linked nucleobases having a nucleobase sequence comprising or consisting of the sequence recited in SEQ ID NO: 2142, wherein the modified oligonucleotide comprises

[0138] a gap segment consisting of eight linked deoxynucleosides;

[0139] a 5′ wing segment consisting of two linked nucleosides; and

[0140] a 3′ wing segment consisting of six linked nucleosides;

[0141] wherein the gap segment is positioned between the 5′ wing segment and the 3′ wing segment; wherein the 5′ wing segment comprises a cEt nucleoside and a cEt nucleoside in the 5′ to 3′ direction; wherein the 3′ wing segment comprises a cEt nucleoside, a 2′-O-methoxyethyl nucleoside, a cEt nucleoside, a 2′-O-methoxyethyl nucleoside, a cEt nucleoside, and a cEt nucleoside in the 5′ to 3′ direction; wherein each internucleoside linkage is a phosphorothioate linkage; and wherein each cytosine is a 5-methylcytosine. In certain embodiments, the modified oligonucleotide consists of 16-30 linked nucleosides. In certain embodiments, the modified oligonucleotide consists of 16 linked nucleosides.

[0142] In certain embodiments, a compound comprises or consists of a modified oligonucleotide consisting of 16-80 linked nucleobases having a nucleobase sequence comprising or consisting of the sequence recited in SEQ ID NO: 2154, wherein the modified oligonucleotide comprises

[0143] a gap segment consisting of nine linked deoxynucleosides;

[0144] a 5′ wing segment consisting of two linked nucleosides; and

[0145] a 3′ wing segment consisting of five linked nucleosides;

[0146] wherein the gap segment is positioned between the 5′ wing segment and the 3′ wing segment; wherein the 5′ wing segment comprises a cEt nucleoside and a cEt nucleoside in the 5′ to 3′ direction; wherein the 3′ wing segment comprises a cEt nucleoside, a 2′-O-methoxyethyl nucleoside, a cEt nucleoside, a 2′-O-methoxyethyl nucleoside, and a cEt nucleoside in the 5′ to 3′ direction; wherein each internucleoside linkage is a phosphorothioate linkage; and wherein each cytosine is a 5-methylcytosine. In certain embodiments, the modified oligonucleotide consists of 16-30 linked nucleosides. In certain embodiments, the modified oligonucleotide consists of 16 linked nucleosides.

[0147] In certain embodiments, a compound comprises or consists of a modified oligonucleotide consisting of 16-80 linked nucleobases having a nucleobase sequence comprising or consisting of the sequence recited in SEQ ID NO: 2158, wherein the modified oligonucleotide comprises

[0148] a gap segment consisting of eight linked deoxynucleosides;

[0149] a 5′ wing segment consisting of three linked nucleosides; and

[0150] a 3′ wing segment consisting of five linked nucleosides;

[0151] wherein the gap segment is positioned between the 5′ wing segment and the 3′ wing segment; wherein the 5′ wing segment comprises a cEt nucleoside, a cEt nucleoside, and a cEt nucleoside in the 5′ to 3′ direction; wherein the 3′ wing segment comprises a cEt nucleoside, a deoxynucleoside, a cEt nucleoside, a deoxynucleoside, and a cEt nucleoside in the 5′ to 3′ direction; wherein each internucleoside linkage is a phosphorothioate linkage; and wherein each cytosine is a 5-methylcytosine. In certain embodiments, the modified oligonucleotide consists of 16-30 linked nucleosides. In certain embodiments, the modified oligonucleotide consists of 16 linked nucleosides.

[0152] In certain embodiments, a compound comprises or consists of ISIS 651987, or a salt thereof, which has the following chemical structure:

[chemical structure]

[0153] In certain embodiments, a compound comprises or consists of ISIS 696018, or a salt thereof, which has the following chemical structure:

[chemical structure]

[0154] In certain embodiments, a compound comprises or consists of ISIS 696044, or a salt thereof, which has the following chemical structure:

[chemical structure]

[0155] In certain embodiments, a compound comprises or consists of ISIS 716600, or a salt thereof, which has the following chemical structure:

[chemical structure]

[0156] In certain embodiments, a compound comprises or consists of ISIS 716655, or a salt thereof, which has the following chemical structure:

[chemical structure]

[0157] In certain embodiments, a compound comprises or consists of ISIS 740233, or a salt thereof, which has the following chemical structure:

[chemical structure]

[0158] In certain embodiments, a compound comprises or consists of ISIS 746275, or a salt thereof, which has the following chemical structure:

[chemical structure]

[0159] In any of the foregoing embodiments, the compound or oligonucleotide can be at least 85%, at least 90%, at least 95%, at least 98%, at least 99%, or 100% complementary to a nucleic acid encoding KRAS.

[0160] In any of the foregoing embodiments, the compound can be a single-stranded oligonucleotide. In certain embodiments, the compound comprises deoxyribonucleotides. In certain embodiments, the compound is double-stranded. In certain embodiments, the compound is double-stranded and comprises ribonucleotides.

[0161] In any of the foregoing embodiments, the oligonucleotide can consist of 8 to 80, 16 to 80, 10 to 30, 12 to 50, 13 to 30, 13 to 50, 14 to 30, 14 to 50, 15 to 30, 15 to 50, 16 to 30, or 16 to 50 linked nucleosides.

[0162] In certain embodiments, a compound comprises a modified oligonucleotide described herein and a conjugate group. In certain embodiments, the conjugate group is linked to the modified oligonucleotide at the 5′ end of the modified oligonucleotide. In certain embodiments, the conjugate group is linked to the modified oligonucleotide at the 3′ end of the modified oligonucleotide. In certain embodiments, the conjugate group comprises at least one N-Acetylgalactosamine (GalNAc), at least two N-Acetylgalactosamines (GalNAcs), or at least three N-Acetylgalactosamines (GalNAcs).

[0163] In certain embodiments, compounds or compositions provided herein comprise a salt of the modified oligonucleotide. In certain embodiments, the salt is a sodium salt. In certain embodiments, the salt is a potassium salt.

[0164] In certain embodiments, the compounds or compositions as described herein are active by virtue of having at least one of an in vitro IC₅₀ of less than 250 nM, less than 200 nM, less than 150 nM, less than 100 nM, less than 90 nM, less than 80 nM, less than 70 nM, less than 65 nM, less than 60 nM, less than 55 nM, less than 50 nM, less than 45 nM, less than 40 nM, less than 35 nM, less than 30 nM, less than 25 nM, or less than 20 nM.

[0165] In certain embodiments, the compounds or compositions as described herein are highly tolerable as demonstrated by having at least one of an increase an alanine transaminase (ALT) or aspartate transaminase (AST) value of no more than 4 fold, 3 fold, or 2 fold over control treated animals or an increase in liver, spleen, or kidney weight of no more than 30%, 20%, 15%, 12%, 10%, 5%, or 2% compared to control treated animals. In certain embodiments, the compounds or compositions as described herein are highly tolerable as demonstrated by having no increase of ALT or AST over control treated animals. In certain embodiments, the compounds or compositions as described herein are highly tolerable as demonstrated by having no increase in liver, spleen, or kidney weight over control treated animals.

### Certain Indications

[0166] Certain embodiments provided herein relate to methods of inhibiting KRAS expression by administration of a KRAS specific inhibitor, such as a compound targeted to KRAS, which can be useful for treating, preventing, or ameliorating cancer in an individual. Examples of types of cancer include but are not limited to lung cancer (e.g. non-small cell lung carcinoma (NSCLC) and small-cell lung carcinoma (SCLC)), gastrointestinal cancer (e.g. large intestinal cancer, small intestinal cancer, and stomach cancer), colon cancer, colorectal cancer, bladder cancer, liver cancer, esophageal cancer, pancreatic cancer, biliary tract cancer, breast cancer, ovarian cancer, endometrial cancer, cervical cancer, prostate cancer, hematopoetic cancer (e.g. leukemia, myeloid leukemia, and lymphoma), brain cancer (e.g. glioblastoma), malignant peripheral nerve sheath tumor (MPNST), neurofibromatosis type 1 (NF1) mutant MPNST, or neurofibroma. In certain embodiments, the cancer has cancer cells expressing mutant KRAS.

[0167] In certain embodiments, a method of treating, preventing, or ameliorating cancer comprises administering to the individual a KRAS specific inhibitor, thereby treating, preventing, or ameliorating cancer. In certain embodiments, the cancer is lung cancer (e.g. non-small cell lung carcinoma (NSCLC) and small-cell lung carcinoma (SCLC)), gastrointestinal cancer (e.g. large intestinal cancer, small intestinal cancer, and stomach cancer), colon cancer, colorectal cancer, bladder cancer, liver cancer, esophageal cancer, pancreatic cancer, biliary tract cancer, breast cancer, ovarian cancer, endometrial cancer, cervical cancer, prostate cancer, hematopoetic cancer (e.g. leukemia, myeloid leukemia, and lymphoma), brain cancer (e.g. glioblastoma), malignant peripheral nerve sheath tumor (MPNST), neurofibromatosis type 1 (NF1) mutant MPNST, or neurofibroma. In certain embodiments, the cancer has cancer cells expressing mutant KRAS. In certain embodiments, the KRAS specific inhibitor is a compound targeted to KRAS, such as an antisense oligonucleotide targeted to KRAS. In certain embodiments, the KRAS specific inhibitor is a compound comprising a modified oligonucleotide consisting of 8 to 80 linked nucleosides and having a nucleobase sequence comprising at least 8 contiguous nucleobases of any of the nucleobase sequences of SEQ ID NOs: 13-2190. In certain embodiments, the KRAS specific inhibitor is a compound comprising a modified oligonucleotide consisting of 16 to 80 linked nucleosides and having a nucleobase sequence comprising the nucleobase sequence of any one of SEQ ID NOs: 13-2190. In certain embodiments, the KRAS specific inhibitor is a compound comprising a modified oligonucleotide consisting of 16 linked nucleosides and having a nucleobase sequence consisting of the nucleobase sequence of any one of SEQ ID NOs: 13-2190. In certain embodiments, the KRAS specific inhibitor is a compound comprising a modified oligonucleotide consisting of 16 to 80 linked nucleosides having a nucleobase sequence comprising any one of SEQ ID NOs: 239, 272, 569, 607, 615, 621, 640, 655, 678, 715, 790, 804, 854, 1028, 2130, 2136, 2142, 2154, and 2158. In certain embodiments, the KRAS specific inhibitor is a compound comprising a modified oligonucleotide consisting of 16 linked nucleosides having a nucleobase sequence consisting of any one of SEQ ID NOs: 239, 272, 569, 607, 615, 621, 640, 655, 678, 715, 790, 804, 854, 1028, 2130, 2136, 2142, 2154, and 2158. In certain embodiments, the KRAS specific inhibitor is ISIS #651530, 651987, 695785, 695823, 651555, 651587, 695980, 695995, 696018, 696044, 716600, 746275, 716655, 716772, 740179, 740191, 740201, 740223, or 740233. In certain embodiments, the KRAS specific inhibitor is ISIS #651987. In certain embodiments, the KRAS specific inhibitor is ISIS #746275. In any of the foregoing embodiments, the compound can be a single-stranded oligonucleotide. In any of the foregoing embodiments, the modified oligonucleotide can consist of 10 to 30 linked nucleosides. In certain embodiments, the compound is administered to the individual parenterally. In certain embodiments, administering the compound reduces the number of cancer cells in an individual, reduces the size of a tumor in an individual, reduces or inhibits growth or proliferation of a tumor in an individual, prevents metastasis or reduces the extent of metastasis, and/or extends the survival of an individual having cancer, including but not limited to progression free survival (PFS) or overall survival.

[0168] In certain embodiments, a method of inhibiting expression of KRAS in an individual having, or at risk of having, cancer comprises administering a KRAS specific inhibitor to the individual, thereby inhibiting expression of KRAS in the individual. In certain embodiments, the cancer expresses mutant KRAS. In certain embodiments, administering the inhibitor inhibits expression of KRAS in a tumor, such as a tumor in the lung, gastrointestinal system, bladder, liver, esophagus, pancreas, biliary tract, breast, ovary, endometrium, cervix, prostate, or brain. In certain embodiments, administering the KRAS specific inhibitor inhibits expression of mutant KRAS. In certain embodiments, administering the KRAS specific inhibitor selectively inhibits expression of mutant KRAS relative to wildtype KRAS. In certain embodiments, the KRAS specific inhibitor is a compound comprising a modified oligonucleotide consisting of 8 to 80 linked nucleosides and having a nucleobase sequence comprising at least 8 contiguous nucleobases of any of the nucleobase sequences of SEQ ID NOs: 13-2190. In certain embodiments, the KRAS specific inhibitor is a compound comprising a modified oligonucleotide consisting of 16 to 80 linked nucleosides and having a nucleobase sequence comprising the nucleobase sequence of any one of SEQ ID NOs: 13-2190. In certain embodiments, the KRAS specific inhibitor is a compound comprising a modified oligonucleotide consisting of 16 linked nucleosides and having a nucleobase sequence consisting of the nucleobase sequence of any one of SEQ ID NOs: 13-2190. In certain embodiments, the KRAS specific inhibitor is a compound comprising a modified oligonucleotide consisting of 16 to 80 linked nucleosides having a nucleobase sequence comprising any one of SEQ ID NOs: 239, 272, 569, 607, 615, 621, 640, 655, 678, 715, 790, 804, 854, 1028, 2130, 2136, 2142, 2154, and 2158. In certain embodiments, the KRAS specific inhibitor is a compound comprising a modified oligonucleotide consisting of 16 linked nucleosides having a nucleobase sequence consisting of any one of SEQ ID NOs: 239, 272, 569, 607, 615, 621, 640, 655, 678, 715, 790, 804, 854, 1028, 2130, 2136, 2142, 2154, and 2158. In certain embodiments, the KRAS specific inhibitor is ISIS #651530, 651987, 695785, 695823, 651555, 651587, 695980, 695995, 696018, 696044, 716600, 746275, 716655, 716772, 740179, 740191, 740201, 740223, or 740233. In certain embodiments, the KRAS specific inhibitor is ISIS #651987. In certain embodiments, the KRAS specific inhibitor is ISIS #746275. In any of the foregoing embodiments, the compound can be a single-stranded oligonucleotide. In any of the foregoing embodiments, the modified oligonucleotide can consist of 10 to 30 linked nucleosides.

[0169] In certain embodiments, a method of inhibiting expression of KRAS in a cell comprises contacting the cell with a KRAS specific inhibitor, thereby inhibiting expression of KRAS in the cell. In certain embodiments, the cell is a cancer cell. In certain embodiments, the cell is in the lung, gastrointestinal system, bladder, liver, esophagus, pancreas, biliary tract, breast, ovary, endometrium, cervix, prostate, or brain. In certain embodiments, the cell is in the lung, gastrointestinal system, bladder, liver, esophagus, pancreas, biliary tract, breast, ovary, endometrium, cervix, prostate, or brain of an individual who has, or is at risk of having cancer. In certain embodiments, the cancer cell expresses mutant KRAS and contacting the cancer cell with the KRAS specific inhibitor inhibits expression of mutant KRAS in the cancer cell. In certain embodiments, contacting the cancer cell with the KRAS specific inhibitor selectively inhibits expression of mutant KRAS. In certain embodiments, the KRAS specific inhibitor is a compound comprising a modified oligonucleotide consisting of 8 to 80 linked nucleosides and having a nucleobase sequence comprising at least 8 contiguous nucleobases of any of the nucleobase sequences of SEQ ID NOs: 13-2190. In certain embodiments, the KRAS specific inhibitor is a compound comprising a modified oligonucleotide consisting of 16 to 80 linked nucleosides and having a nucleobase sequence comprising the nucleobase sequence of any one of SEQ ID NOs: 13-2190. In certain embodiments, the KRAS specific inhibitor is a compound comprising a modified oligonucleotide consisting of 16 linked nucleosides and having a nucleobase sequence consisting of the nucleobase sequence of any one of SEQ ID NOs: 13-2190. In certain embodiments, the KRAS specific inhibitor is a compound comprising a modified oligonucleotide consisting of 16 to 80 linked nucleosides having a nucleobase sequence comprising any one of SEQ ID NOs: 239, 272, 569, 607, 615, 621, 640, 655, 678, 715, 790, 804, 854, 1028, 2130, 2136, 2142, 2154, and 2158. In certain embodiments, the KRAS specific inhibitor is a compound comprising a modified oligonucleotide consisting of 16 linked nucleosides having a nucleobase sequence consisting of any one of SEQ ID NOs: 239, 272, 569, 607, 615, 621, 640, 655, 678, 715, 790, 804, 854, 1028, 2130, 2136, 2142, 2154, and 2158. In certain embodiments, the KRAS specific inhibitor is ISIS #651530, 651987, 695785, 695823, 651555, 651587, 695980, 695995, 696018, 696044, 716600, 746275, 716655, 716772, 740179, 740191, 740201, 740223, or 740233. In certain embodiments, the KRAS specific inhibitor is ISIS #651987. In certain embodiments, the KRAS specific inhibitor is ISIS #746275. In any of the foregoing embodiments, the compound can be a single-stranded oligonucleotide. In any of the foregoing embodiments, the modified oligonucleotide can consist of 10 to 30 linked nucleosides.

[0170] In certain embodiments, a method of reducing the number of cancer cells in an individual, reducing the size of a tumor in an individual, reducing or inhibiting growth or proliferation of a tumor in an individual, preventing metastasis or reducing the extent of metastasis, and/or extending the survival (including but not limited to progression free survival (PFS) or overall survival) of an individual having cancer comprises administering a KRAS specific inhibitor to the individual. In certain embodiments, the inhibitor is a compound targeted to KRAS. In certain embodiments, the inhibitor is a compound targeted to mutant KRAS. In certain embodiments, the inhibitor is a compound selectively targeted to mutant KRAS. In certain embodiments, the cancer cells or tumor expresses mutant KRAS. In certain embodiments, administering the KRAS specific inhibitor to the individual selectively reduces the number of mutant KRAS expressing cancer cells, selectively reduces the size of a mutant KRAS expressing tumor, selectively reduces or inhibits growth or proliferation of a mutant KRAS expressing tumor, selectively prevents metastasis or reduces the extent of metastasis of a mutant KRAS expressing tumor, and/or selectively extends the survival of an individual having a mutant KRAS expressing cancer relative to cells, tumors, and cancer expressing wildtype KRAS. In certain embodiments, the KRAS specific inhibitor is a compound comprising a modified oligonucleotide consisting of 8 to 80 linked nucleosides and having a nucleobase sequence comprising at least 8 contiguous nucleobases of any of the nucleobase sequences of SEQ ID NOs: 13-2190. In certain embodiments, the KRAS specific inhibitor is a compound comprising a modified oligonucleotide consisting of 16 to 80 linked nucleosides and having a nucleobase sequence comprising the nucleobase sequence of any one of SEQ ID NOs: 13-2190. In certain embodiments, the KRAS specific inhibitor is a compound comprising a modified oligonucleotide consisting of 16 linked nucleosides and having a nucleobase sequence consisting of the nucleobase sequence of any one of SEQ ID NOs: 13-2190. In certain embodiments, the KRAS specific inhibitor is a compound comprising a modified oligonucleotide consisting of 16 to 80 linked nucleosides having a nucleobase sequence comprising any one of SEQ ID NOs: 239, 272, 569, 607, 615, 621, 640, 655, 678, 715, 790, 804, 854, 1028, 2130, 2136, 2142, 2154, and 2158. In certain embodiments, the KRAS specific inhibitor is a compound comprising a modified oligonucleotide consisting of 16 linked nucleosides having a nucleobase sequence consisting of any one of SEQ ID NOs: 239, 272, 569, 607, 615, 621, 640, 655, 678, 715, 790, 804, 854, 1028, 2130, 2136, 2142, 2154, and 2158. In certain embodiments, the KRAS specific inhibitor is ISIS #651530, 651987, 695785, 695823, 651555, 651587, 695980, 695995, 696018, 696044, 716600, 746275, 716655, 716772, 740179, 740191, 740201, 740223, or 740233. In certain embodiments, the KRAS specific inhibitor is ISIS #651987. In certain embodiments, the KRAS specific inhibitor is ISIS #746275. In any of the foregoing embodiments, the compound can be a single-stranded oligonucleotide. In any of the foregoing embodiments, the modified oligonucleotide can consist of 10 to 30 linked nucleosides. In certain embodiments, the compound is administered to the individual parenterally.

[0171] Certain embodiments are drawn to a KRAS specific inhibitor for use in treating cancer. In certain embodiments, the cancer is lung cancer (e.g. non-small cell lung carcinoma (NSCLC) and small-cell lung carcinoma (SCLC)), gastrointestinal cancer (e.g. large intestinal cancer, small intestinal cancer, and stomach cancer), colon cancer, colorectal cancer, bladder cancer, liver cancer, esophageal cancer, pancreatic cancer, biliary tract cancer, breast cancer, ovarian cancer, endometrial cancer, cervical cancer, prostate cancer, hematopoetic cancer (e.g. leukemia, myeloid leukemia, and lymphoma), brain cancer (e.g. glioblastoma), malignant peripheral nerve sheath tumor (MPNST), neurofibromatosis type 1 (NF1) mutant MPNST, or neurofibroma. In certain embodiments, the cancer expresses mutant KRAS. In certain embodiments, the inhibitor is a compound targeted to KRAS. In certain embodiments, the inhibitor is a compound targeted to mutant KRAS. In certain embodiments, the inhibitor is a compound selectively targeted to mutant KRAS. In certain embodiments, the KRAS specific inhibitor is a compound comprising a modified oligonucleotide consisting of 8 to 80 linked nucleosides and having a nucleobase sequence comprising at least 8 contiguous nucleobases of any of the nucleobase sequences of SEQ ID NOs: 13-2190. In certain embodiments, the KRAS specific inhibitor is a compound comprising a modified oligonucleotide consisting of 16 to 80 linked nucleosides and having a nucleobase sequence comprising the nucleobase sequence of any one of SEQ ID NOs: 13-2190. In certain embodiments, the KRAS specific inhibitor is a compound comprising a modified oligonucleotide consisting of 16 linked nucleosides and having a nucleobase sequence consisting of the nucleobase sequence of any one of SEQ ID NOs: 13-2190. In certain embodiments, the KRAS specific inhibitor is a compound comprising a modified oligonucleotide consisting of 16 to 80 linked nucleosides having a nucleobase sequence comprising any one of SEQ ID NOs: 239, 272, 569, 607, 615, 621, 640, 655, 678, 715, 790, 804, 854, 1028, 2130, 2136, 2142, 2154, and 2158. In certain embodiments, the KRAS specific inhibitor is a compound comprising a modified oligonucleotide consisting of 16 linked nucleosides having a nucleobase sequence consisting of any one of SEQ ID NOs: 239, 272, 569, 607, 615, 621, 640, 655, 678, 715, 790, 804, 854, 1028, 2130, 2136, 2142, 2154, and 2158. In certain embodiments, the KRAS specific inhibitor is ISIS #651530, 651987, 695785, 695823, 651555, 651587, 695980, 695995, 696018, 696044, 716600, 746275, 716655, 716772, 740179, 740191, 740201, 740223, or 740233. In certain embodiments, the KRAS specific inhibitor is ISIS #651987. In certain embodiments, the KRAS specific inhibitor is ISIS #746275. In any of the foregoing embodiments, the compound can be a single-stranded oligonucleotide. In any of the foregoing embodiments, the modified oligonucleotide can consist of 10 to 30 linked nucleosides. In certain embodiments, the compound is administered to the individual parenterally.

[0172] Certain embodiments are drawn to a KRAS specific inhibitor for use in reducing the number of cancer cells in an individual, reducing the size of a tumor in an individual, reducing or inhibiting growth or proliferation of a tumor in an individual, preventing metastasis or reducing the extent of metastasis, and/or extending the survival (including but not limited to progression free survival (PFS) or overall survival) of an individual having or at risk of having cancer. In certain embodiments, the cancer cells or tumor express mutant KRAS. In certain embodiments, the inhibitor is a compound targeted to KRAS. In certain embodiments, the inhibitor is a compound targeted to mutant KRAS. In certain embodiments, the inhibitor is a compound selectively targeted to mutant KRAS for use in selectively reducing the number of cancer cells in an individual, selectively reducing the size of a tumor in an individual, selectively reducing or inhibiting growth or proliferation of a tumor in an individual, selectively preventing metastasis or reducing the extent of metastasis, and/or selectively extending the survival (including but not limited to progression free survival (PFS) or overall survival) of an individual having or at risk of having cancer expressing mutant KRAS. In certain embodiments, the KRAS specific inhibitor is a compound comprising a modified oligonucleotide consisting of 8 to 80 linked nucleosides and having a nucleobase sequence comprising at least 8 contiguous nucleobases of any of the nucleobase sequences of SEQ ID NOs: 13-2190. In certain embodiments, the KRAS specific inhibitor is a compound comprising a modified oligonucleotide consisting of 16 to 80 linked nucleosides and having a nucleobase sequence comprising the nucleobase sequence of any one of SEQ ID NOs: 13-2190. In certain embodiments, the KRAS specific inhibitor is a compound comprising a modified oligonucleotide consisting of 16 linked nucleosides and having a nucleobase sequence consisting of the nucleobase sequence of any one of SEQ ID NOs: 13-2190. In certain embodiments, the KRAS specific inhibitor is a compound comprising a modified oligonucleotide consisting of 16 to 80 linked nucleosides having a nucleobase sequence comprising any one of SEQ ID NOs: 239, 272, 569, 607, 615, 621, 640, 655, 678, 715, 790, 804, 854, 1028, 2130, 2136, 2142, 2154, and 2158. In certain embodiments, the KRAS specific inhibitor is a compound comprising a modified oligonucleotide consisting of 16 linked nucleosides having a nucleobase sequence consisting of any one of SEQ ID NOs: 239, 272, 569, 607, 615, 621, 640, 655, 678, 715, 790, 804, 854, 1028, 2130, 2136, 2142, 2154, and 2158. In certain embodiments, the KRAS specific inhibitor is ISIS #651530, 651987, 695785, 695823, 651555, 651587, 695980, 695995, 696018, 696044, 716600, 746275, 716655, 716772, 740179, 740191, 740201, 740223, or 740233. In certain embodiments, the KRAS specific inhibitor is ISIS #651987. In certain embodiments, the KRAS specific inhibitor is ISIS #746275. In any of the foregoing embodiments, the compound can be a single-stranded oligonucleotide. In any of the foregoing embodiments, the modified oligonucleotide can consist of 10 to 30 linked nucleosides. In certain embodiments, the compound is administered to the individual parenterally.

[0173] Certain embodiments are drawn to use of a KRAS specific inhibitor for the manufacture of a medicament for treating cancer. Certain embodiments are drawn to use of a KRAS specific inhibitor for the preparation of a medicament for treating cancer. In certain embodiments, the cancer expresses mutant KRAS. In certain embodiments, the cancer is lung cancer (e.g. non-small cell lung carcinoma (NSCLC) and small-cell lung carcinoma (SCLC)), gastrointestinal cancer (e.g. large intestinal cancer, small intestinal cancer, and stomach cancer), colon cancer, colorectal cancer, bladder cancer, liver cancer, esophageal cancer, pancreatic cancer, biliary tract cancer, breast cancer, ovarian cancer, endometrial cancer, cervical cancer, prostate cancer, hematopoetic cancer (e.g. leukemia, myeloid leukemia, and lymphoma), brain cancer (e.g. glioblastoma), malignant peripheral nerve sheath tumor (MPNST), neurofibromatosis type 1 (NF1) mutant MPNST, or neurofibroma. In certain embodiments, the inhibitor is a compound targeted to KRAS. In certain embodiments, the inhibitor is a compound targeted to mutant KRAS. In certain embodiments, the inhibitor is a compound selectively targeted to mutant KRAS. In certain embodiments, the KRAS specific inhibitor is a compound comprising a modified oligonucleotide consisting of 8 to 80 linked nucleosides and having a nucleobase sequence comprising at least 8 contiguous nucleobases of any of the nucleobase sequences of SEQ ID NOs: 13-2190. In certain embodiments, the KRAS specific inhibitor is a compound comprising a modified oligonucleotide consisting of 16 to 80 linked nucleosides and having a nucleobase sequence comprising the nucleobase sequence of any one of SEQ ID NOs: 13-2190. In certain embodiments, the KRAS specific inhibitor is a compound comprising a modified oligonucleotide consisting of 16 linked nucleosides and having a nucleobase sequence consisting of the nucleobase sequence of any one of SEQ ID NOs: 13-2190. In certain embodiments, the KRAS specific inhibitor is a compound comprising a modified oligonucleotide consisting of 16 to 80 linked nucleosides having a nucleobase sequence comprising any one of SEQ ID NOs: 239, 272, 569, 607, 615, 621, 640, 655, 678, 715, 790, 804, 854, 1028, 2130, 2136, 2142, 2154, and 2158. In certain embodiments, the KRAS specific inhibitor is a compound comprising a modified oligonucleotide consisting of 16 linked nucleosides having a nucleobase sequence consisting of any one of SEQ ID NOs: 239, 272, 569, 607, 615, 621, 640, 655, 678, 715, 790, 804, 854, 1028, 2130, 2136, 2142, 2154, and 2158. In certain embodiments, the KRAS specific inhibitor is ISIS #651530, 651987, 695785, 695823, 651555, 651587, 695980, 695995, 696018, 696044, 716600, 746275, 716655, 716772, 740179, 740191, 740201, 740223, or 740233. In certain embodiments, the KRAS specific inhibitor is ISIS #651987. In certain embodiments, the KRAS specific inhibitor is ISIS #746275. In any of the foregoing embodiments, the compound can be a single-stranded oligonucleotide. In any of the foregoing embodiments, the modified oligonucleotide can consist of 10 to 30 linked nucleosides. In certain embodiments, the compound is administered to the individual parenterally.

[0174] Certain embodiments are drawn to use of a KRAS specific inhibitor for the manufacture or preparation of a medicament for use in reducing the number of cancer cells in an individual, reducing the size of a tumor in an individual, reducing or inhibiting growth or proliferation of a tumor in an individual, preventing metastasis or reducing the extent of metastasis, and/or extending the survival (including but not limited to progression free survival (PFS) or overall survival) in an individual having or at risk of having cancer. In certain embodiments, the cancer cells or tumor expresses mutant KRAS. In certain embodiments, the inhibitor is a compound targeted to KRAS. In certain embodiments, the inhibitor is a compound targeted to KRAS. In certain embodiments, the inhibitor is a compound targeted to mutant KRAS. In certain embodiments, the inhibitor is a compound selectively targeted to mutant KRAS for the manufacture or preparation of a medicament for use in selectively reducing the number of cancer cells in an individual, selectively reducing the size of a tumor in an individual, selectively reducing or inhibiting growth or proliferation of a tumor in an individual, selectively preventing metastasis or reducing the extent of metastasis, and/or selectively extending the survival (including but not limited to progression free survival (PFS) or overall survival) of an individual having or at risk of having cancer expressing mutant KRAS. In certain embodiments, the KRAS specific inhibitor is a compound comprising a modified oligonucleotide consisting of 8 to 80 linked nucleosides and having a nucleobase sequence comprising at least 8 contiguous nucleobases of any of the nucleobase sequences of SEQ ID NOs: 13-2190. In certain embodiments, the KRAS specific inhibitor is a compound comprising a modified oligonucleotide consisting of 16 to 80 linked nucleosides and having a nucleobase sequence comprising the nucleobase sequence of any one of SEQ ID NOs: 13-2190. In certain embodiments, the KRAS specific inhibitor is a compound comprising a modified oligonucleotide consisting of 16 linked nucleosides and having a nucleobase sequence consisting of the nucleobase sequence of any one of SEQ ID NOs: 13-2190. In certain embodiments, the KRAS specific inhibitor is a compound comprising a modified oligonucleotide consisting of 16 to 80 linked nucleosides having a nucleobase sequence comprising any one of SEQ ID NOs: 239, 272, 569, 607, 615, 621, 640, 655, 678, 715, 790, 804, 854, 1028, 2130, 2136, 2142, 2154, and 2158. In certain embodiments, the KRAS specific inhibitor is a compound comprising a modified oligonucleotide consisting of 16 linked nucleosides having a nucleobase sequence consisting of any one of SEQ ID NOs: 239, 272, 569, 607, 615, 621, 640, 655, 678, 715, 790, 804, 854, 1028, 2130, 2136, 2142, 2154, and 2158. In certain embodiments, the KRAS specific inhibitor is ISIS #651530, 651987, 695785, 695823, 651555, 651587, 695980, 695995, 696018, 696044, 716600, 746275, 716655, 716772, 740179, 740191, 740201, 740223, or 740233. In certain embodiments, the KRAS specific inhibitor is ISIS #651987. In certain embodiments, the KRAS specific inhibitor is ISIS #746275. In any of the foregoing embodiments, the compound can be a single-stranded oligonucleotide. In any of the foregoing embodiments, the modified oligonucleotide can consist of 10 to 30 linked nucleosides. In certain embodiments, the compound is administered to the individual parenterally.

[0175] In any of the foregoing methods or uses, the KRAS specific inhibitor can be a compound targeted to KRAS, a compound targeted to mutant KRAS, or a compound selectively targeted to mutant KRAS. In certain embodiments, the compound is an antisense oligonucleotide, for example an antisense oligonucleotide consisting of 8 to 80 linked nucleosides, 10 to 30 linked nucleosides, 12 to 30 linked nucleosides, or 16 linked nucleosides. In certain embodiments, the antisense oligonucleotide is at least 80%, 85%, 90%, 95% or 100% complementary to any of the nucleobase sequences recited in SEQ ID NOs: 1-3. In certain embodiments, the antisense oligonucleotide comprises at least one modified internucleoside linkage, at least one modified sugar and/or at least one modified nucleobase. In certain embodiments, the modified internucleoside linkage is a phosphorothioate internucleoside linkage, the modified sugar is a bicyclic sugar or a 2′-O-methoxyethyl, and the modified nucleobase is a 5-methylcytosine. In certain embodiments, the modified oligonucleotide comprises a gap segment consisting of linked deoxynucleosides; a 5′ wing segment consisting of linked nucleosides; and a 3′ wing segment consisting of linked nucleosides, wherein the gap segment is positioned immediately adjacent to and between the 5′ wing segment and the 3′ wing segment and wherein each nucleoside of each wing segment comprises a modified sugar.

[0176] In any of the foregoing embodiments, the antisense oligonucleotide consists of 12 to 30, 15 to 30, 15 to 25, 15 to 24, 16 to 24, 17 to 24, 18 to 24, 19 to 24, 20 to 24, 19 to 22, 20 to 22, 16 to 20, or 17 or 20 linked nucleosides. In certain aspects, the antisense oligonucleotide is at least 80%, 85%, 90%, 95% or 100% complementary to any of the nucleobase sequences recited in SEQ ID NOs: 1-3. In certain aspects, the antisense oligonucleotide comprises at least one modified internucleoside linkage, at least one modified sugar and/or at least one modified nucleobase. In certain aspects, the modified internucleoside linkage is a phosphorothioate internucleoside linkage, the modified sugar is a bicyclic sugar or a 2′-O-methoxyethyl, and the modified nucleobase is a 5-methylcytosine. In certain aspects, the modified oligonucleotide comprises a gap segment consisting of linked 2′-deoxynucleosides; a 5′ wing segment consisting of linked nucleosides; and a 3′ wing segment consisting of linked nucleosides, wherein the gap segment is positioned immediately adjacent to and between the 5′ wing segment and the 3′ wing segment and wherein each nucleoside of each wing segment comprises a modified sugar.

[0177] In any of the foregoing methods or uses, the KRAS specific inhibitor can be a compound comprising or consisting of a modified oligonucleotide consisting of 16 to 30 linked nucleosides having a nucleobase sequence comprising any one of SEQ ID NOs: 13-2190, wherein the modified oligonucleotide comprises:
[0178] a gap segment consisting of linked deoxynucleosides;
[0179] a 5′ wing segment consisting of linked nucleosides; and
[0180] a 3′ wing segment consisting of linked nucleosides;

[0181] wherein the gap segment is positioned between the 5′ wing segment and the 3′ wing segment and wherein each nucleoside of each wing segment comprises a modified sugar.

[0182] In any of the foregoing methods or uses, the KRAS specific inhibitor can be a compound comprising or consisting of a modified oligonucleotide having a nucleobase sequence comprising or consisting of the sequence recited in any one of SEQ ID NOs: 239, 272, 569, 607, 615, 621, 640, 655, 678, 715, 790, and 854, wherein the modified oligonucleotide comprises

[0183] a gap segment consisting of ten linked deoxynucleosides;

[0184] a 5′ wing segment consisting of three linked nucleosides; and

[0185] a 3′ wing segment consisting of three linked nucleosides;

[0186] wherein the gap segment is positioned between the 5′ wing segment and the 3′ wing segment, wherein each nucleoside of each wing segment comprises a constrained ethyl (cEt) nucleoside; wherein each internucleoside linkage is a phosphorothioate linkage and wherein each cytosine is a 5-methylcytosine. In certain embodiments, the modified oligonucleotide consists of 16-80 linked nucleosides. In certain embodiments, the modified oligonucleotide consists of 16-30 linked nucleosides. In certain embodiments, the modified oligonucleotide consists of 16 linked nucleosides.

[0187] In any of the foregoing methods or uses, the KRAS specific inhibitor can be a compound comprising or consisting of a modified oligonucleotide having a nucleobase sequence comprising or consisting of the sequence recited in SEQ ID NO: 2130, wherein the modified oligonucleotide comprises

[0188] a gap segment consisting of nine linked deoxynucleosides;

[0189] a 5′ wing segment consisting of one linked nucleoside; and

[0190] a 3′ wing segment consisting of six linked nucleosides;

[0191] wherein the gap segment is positioned between the 5′ wing segment and the 3′ wing segment;

[0192] wherein the 5′ wing segment comprises a cEt nucleoside; wherein the 3′ wing segment comprises a cEt nucleoside, a 2′-O-methoxyethyl nucleoside, a cEt nucleoside, a 2′-O-methoxyethyl nucleoside, a cEt nucleoside, and 2′-O-methoxyethyl nucleoside in the 5′ to 3′ direction; wherein each internucleoside linkage is a phosphorothioate linkage; and wherein each cytosine is a 5-methylcytosine. In certain embodiments, the modified oligonucleotide consists of 16-80 linked nucleosides. In certain embodiments, the modified oligonucleotide consists of 16-30 linked nucleosides. In certain embodiments, the modified oligonucleotide consists of 16 linked nucleosides.

[0193] In any of the foregoing methods or uses, the KRAS specific inhibitor can be a compound comprising or consisting of a modified oligonucleotide having a nucleobase sequence comprising or consisting of the sequence recited in any one of SEQ ID NOs: 804, 1028, and 2136, wherein the modified oligonucleotide comprises

[0194] a gap segment consisting of ten linked deoxynucleosides;

[0195] a 5′ wing segment consisting of two linked nucleosides; and

[0196] a 3′ wing segment consisting of four linked nucleosides;

[0197] wherein the gap segment is positioned between the 5′ wing segment and the 3′ wing segment;

[0198] wherein the 5′ wing segment comprises a cEt nucleoside and a cEt nucleoside in the 5′ to 3′ direction; wherein the 3′ wing segment comprises a cEt nucleoside, a 2′-O-methoxyethyl nucleoside, a cEt nucleoside, and a 2′-O-methoxyethyl nucleoside in the 5′ to 3′ direction; wherein each internucleoside linkage is a phosphorothioate linkage; and wherein each cytosine is a 5-methylcytosine. In certain embodiments, the modified oligonucleotide consists of 16-80 linked nucleosides. In certain embodiments, the modified oligonucleotide consists of 16-30 linked nucleosides. In certain embodiments, the modified oligonucleotide consists of 16 linked nucleosides.

[0199] In any of the foregoing methods or uses, the KRAS specific inhibitor can be a compound comprising or consisting of a modified oligonucleotide having a nucleobase sequence comprising or consisting of the sequence recited in SEQ ID NO: 2142, wherein the modified oligonucleotide comprises

[0200] a gap segment consisting of eight linked deoxynucleosides;

[0201] a 5′ wing segment consisting of two linked nucleosides; and

[0202] a 3′ wing segment consisting of six linked nucleosides;

[0203] wherein the gap segment is positioned between the 5′ wing segment and the 3′ wing segment; wherein the 5′ wing segment comprises a cEt nucleoside and a cEt nucleoside in the 5′ to 3′ direction; wherein the 3′ wing segment comprises a cEt nucleoside, a 2′-O-methoxyethyl nucleoside, a cEt nucleoside, a 2′-O-methoxyethyl nucleoside, a cEt nucleoside, and a cEt nucleoside in the 5′ to 3′ direction; wherein each internucleoside linkage is a phosphorothioate linkage; and wherein each cytosine is a 5-methylcytosine. In certain embodiments, the modified oligonucleotide consists of 16-80 linked nucleosides. In certain embodiments, the modified oligonucleotide consists of 16-30 linked nucleosides. In certain embodiments, the modified oligonucleotide consists of 16 linked nucleosides.

[0204] In any of the foregoing methods or uses, the KRAS specific inhibitor can be a compound comprising or consisting of a modified oligonucleotide having a nucleobase sequence comprising or consisting of the sequence recited in SEQ ID NO: 2154, wherein the modified oligonucleotide comprises

[0205] a gap segment consisting of nine linked deoxynucleosides;

[0206] a 5′ wing segment consisting of two linked nucleosides; and

[0207] a 3′ wing segment consisting of five linked nucleosides;

[0208] wherein the gap segment is positioned between the 5′ wing segment and the 3′ wing segment; wherein the 5′ wing segment comprises a cEt nucleoside and a cEt nucleoside in the 5′ to 3′ direction; wherein the 3′ wing segment comprises a cEt nucleoside, a 2′-O-methoxyethyl nucleoside, a cEt nucleoside, a 2′-O-methoxyethyl nucleoside, and a cEt nucleoside in the 5′ to 3′ direction; wherein each internucleoside linkage is a phosphorothioate linkage; and wherein each cytosine is a 5-methylcytosine. In certain embodiments, the modified oligonucleotide consists of 16-80 linked nucleosides. In certain embodiments, the modified oligonucleotide consists of 16-30 linked nucleosides. In certain embodiments, the modified oligonucleotide consists of 16 linked nucleosides.

[0209] In any of the foregoing methods or uses, the KRAS specific inhibitor can be a compound comprising or consisting of a modified oligonucleotide having a nucleobase sequence comprising or consisting of the sequence recited in SEQ ID NO: 2158, wherein the modified oligonucleotide comprises

[0210] a gap segment consisting of eight linked deoxynucleosides;

[0211] a 5′ wing segment consisting of three linked nucleosides; and

[0212] a 3′ wing segment consisting of five linked nucleosides;

[0213] wherein the gap segment is positioned between the 5′ wing segment and the 3′ wing segment; wherein the 5′ wing segment comprises a cEt nucleoside, a cEt nucleoside, and a cEt nucleoside in the 5′ to 3′ direction; wherein the 3′ wing segment comprises a cEt nucleoside, a deoxynucleoside, a cEt nucleoside, a deoxynucleoside, and a cEt nucleoside in the 5′ to 3′ direction; wherein each internucleoside linkage is a phosphorothioate linkage; and wherein each cytosine is a 5-methylcytosine. In certain embodiments, the modified oligonucleotide consists of 16-80 linked nucleosides. In certain embodiments, the modified oligonucleotide consists of 16-30 linked nucleosides. In certain embodiments, the modified oligonucleotide consists of 16 linked nucleosides.

[0214] In any of the foregoing methods or uses, the KRAS specific inhibitor can be administered parenterally. For example, in certain embodiments the KRAS specific inhibitor can be administered through injection or infusion. Parenteral administration includes subcutaneous administration, intravenous administration, intramuscular administration, intraarterial administration, intraperitoneal administration, or intracranial administration, e.g. intrathecal or intracerebroventricular administration.

### Antisense Compounds

[0215] Antisense compounds are provided in certain embodiments. In certain embodiments, antisense compounds comprise at least one oligonucleotide. In certain embodiments, antisense compounds consist of an oligonucleotide. In certain embodiments, antisense compounds consist of an oligonucleotide attached to one or more conjugate groups. In certain embodiments, antisense compounds consist of an oligonucleotide attached to one or more conjugate groups via one or more conjugate linkers and/or a cleavable moiety. In certain embodiments, the oligonucleotide of an antisense compound is modified. In certain embodiments, the oligonucleotide of an antisense compound may have any nucleobase sequence. In certain embodiments, the oligonucleotide of an antisense compound is an antisense oligonucleotide having a nucleobase sequence that is complementary to a target nucleic acid. In certain embodiments, antisense oligonucleotides are complementary to a messenger RNA (mRNA).

[0216] In certain embodiments, an antisense compound has a nucleobase sequence that, when written in the 5′ to 3′ direction, comprises the reverse complement of the target segment of a target nucleic acid to which it is targeted.

[0217] In certain embodiments, an antisense compound is 10 to 30 subunits in length. In certain embodiments, an antisense compound is 12 to 30 subunits in length. In certain embodiments, an antisense compound is 12 to 22 subunits in length. In certain embodiments, an antisense compound is 14 to 30 subunits in length. In certain embodiments, an antisense compound is 14 to 20 subunits in length. In certain embodiments, an antisense compound is 15 to 30 subunits in length. In certain embodiments, an antisense compound is 15 to 20 subunits in length. In certain embodiments, an antisense compound is 16 to 30 subunits in length. In certain embodiments, an antisense compound is 16 to 20 subunits in length. In certain embodiments, an antisense compound is 17 to 30 subunits in length. In certain embodiments, an antisense compound is 17 to 20 subunits in length. In certain embodiments, an antisense compound is 18 to 30 subunits in length. In certain embodiments, an antisense compound is 18 to 21 subunits in length. In certain embodiments, an antisense compound is 18 to 20 subunits in length. In certain embodiments, an antisense compound is 20 to 30 subunits in length. In other words, such antisense compounds are from 12 to 30 linked subunits, 14 to 30 linked subunits, 14 to 20 subunits, 15 to 30 subunits, 15 to 20 subunits, 16 to 30 subunits, 16 to 20 subunits, 17 to 30 subunits, 17 to 20 subunits, 18 to 30 subunits, 18 to 20 subunits, 18 to 21 subunits, 20 to 30 subunits, or 12 to 22 linked subunits, respectively. In certain embodiments, an antisense compound is 14 subunits in length. In certain embodiments, an antisense compound is 16 subunits in length. In certain embodiments, an antisense compound is 17 subunits in length. In certain embodiments, an antisense compound is 18 subunits in length. In certain embodiments, an antisense compound is 19 subunits in length. In certain embodiments, an antisense compound is 20 subunits in length. In other embodiments, the antisense compound is 8 to 80, 12 to 50, 13 to 30, 13 to 50, 14 to 30, 14 to 50, 15 to 30, 15 to 50, 16 to 30, 16 to 50, 17 to 30, 17 to 50, 18 to 22, 18 to 24, 18 to 30, 18 to 50, 19 to 22, 19 to 30, 19 to 50, or 20 to 30 linked subunits. In certain such embodiments, the antisense compounds are 8, 9, 10, 11, 12, 13, 14, 15, 16, 17, 18, 19, 20, 21, 22, 23, 24, 25, 26, 27, 28, 29, 30, 31, 32, 33, 34, 35, 36, 37, 38, 39, 40, 41, 42, 43, 44, 45, 46, 47, 48, 49, 50, 51, 52, 53, 54, 55, 56, 57, 58, 59, 60, 61, 62, 63, 64, 65, 66, 67, 68, 69, 70, 71, 72, 73, 74, 75, 76, 77, 78, 79, or 80 linked subunits in length, or a range defined by any two of the above values. In some embodiments the antisense compound is an antisense oligonucleotide, and the linked subunits are nucleotides, nucleosides, or nucleobases.

[0218] In certain embodiments, the antisense compound or oligomeric compound may further comprise additional features or elements, such as a conjugate group, that are attached to the oligonucleotide. In embodiments where a conjugate group comprises a nucleoside (i.e. a nucleoside that links the conjugate group to the oligonucleotide), the nucleoside of the conjugate group is not counted in the length of the oligonucleotide.

[0219] In certain embodiments antisense compounds may be shortened or truncated. For example, a single subunit may be deleted from the 5′ end (5′ truncation), or alternatively from the 3′ end (3′ truncation). A shortened or truncated antisense compound targeted to an KRAS nucleic acid may have two subunits deleted from the 5′ end, or alternatively may have two subunits deleted from the 3′ end, of the antisense compound. Alternatively, the deleted nucleosides may be dispersed throughout the antisense compound.

[0220] When a single additional subunit is present in a lengthened antisense compound, the additional subunit may be located at the 5′ or 3′ end of the antisense compound. When two or more additional subunits are present, the added subunits may be adjacent to each other, for example, in an antisense compound having two subunits added to the 5′ end (5′ addition), or alternatively to the 3′ end (3′ addition), of the antisense compound. Alternatively, the added subunits may be dispersed throughout the antisense compound, for example, in an antisense compound having one subunit added to the 5′ end and one subunit added to the 3′ end.

[0221] It is possible to increase or decrease the length of an antisense compound, such as an antisense oligonucleotide, and/or introduce mismatch bases without eliminating activity (Woolf et al. (Proc. Natl. Acad. Sci. USA 89:7305-7309, 1992; Gautschi et al. J. Natl. Cancer Inst. 93:463-471, March 2001; Maher and Dolnick Nuc. Acid. Res. 16:3341-3358, 1988). However, seemingly small changes in oligonucleotide sequence, chemistry and motif can make large differences in one or more of the many properties required for clinical development (Seth et al. J. Med. Chem. 2009, 52, 10; Egli et al. J. Am. Chem. Soc. 2011, 133, 16642).

[0222] In certain embodiments, antisense compounds are single-stranded, consisting of one oligomeric compound. The oligonucleotide of such single-stranded antisense compounds is an antisense oligonucleotide. In certain embodiments, the antisense oligonucleotide of a single-stranded antisense compound is modified. In certain embodiments, the oligonucleotide of a single-stranded antisense compound or oligomeric compound comprises a self-complementary nucleobase sequence. In certain embodiments, antisense compounds are double-stranded, comprising two oligomeric compounds that form a duplex. In certain such embodiments, one oligomeric compound of a double-stranded antisense compound comprises one or more conjugate groups. In certain embodiments, each oligomeric compound of a double-stranded antisense compound comprises one or more conjugate groups. In certain embodiments, each oligonucleotide of a double-stranded antisense compound is a modified oligonucleotide. In certain embodiments, one oligonucleotide of a double-stranded antisense compound is a modified oligonucleotide. In certain embodiments, one oligonucleotide of a double-stranded antisense compound is an antisense oligonucleotide. In certain such embodiments, the antisense oligonucleotide is a modified oligonucleotide. Examples of single-stranded and double-stranded antisense compounds include but are not limited to antisense oligonucleotides, siRNAs, microRNA targeting oligonucleotides, and single-stranded RNAi compounds, such as small hairpin RNAs (shRNAs), single-stranded siRNAs (ssRNAs), and microRNA mimics.

[0223] In certain embodiments, antisense compounds are interfering RNA compounds (RNAi), which include double-stranded RNA compounds (also referred to as short-interfering RNA or siRNA) and single-stranded RNAi compounds (or ssRNA). Such compounds work at least in part through the RISC pathway to degrade and/or sequester a target nucleic acid (thus, include microRNA/microRNA-mimic compounds). As used herein, the term siRNA is meant to be equivalent to other terms used to describe nucleic acid molecules that are capable of mediating sequence specific RNAi, for example short interfering RNA (siRNA), double-stranded RNA (dsRNA), micro-RNA (miRNA), short hairpin RNA (shRNA), short interfering oligonucleotide, short interfering nucleic acid, short interfering modified oligonucleotide, chemically modified siRNA, post-transcriptional gene silencing RNA (ptgsRNA), and others. In addition, as used herein, the term RNAi is meant to be equivalent to other terms used to describe sequence specific RNA interference, such as post transcriptional gene silencing, translational inhibition, or epigenetics.

[0224] In certain embodiments, a double-stranded compound can comprise any of the oligonucleotide sequences targeted to KRAS described herein. In certain embodiments, a double-stranded compound comprises a first strand comprising at least an 8, 9, 10, 11, 12, 13, 14, 15, 16, 17, 18, 19, or 20 contiguous nucleobase portion of any one of SEQ ID NOs: 13-2190 and a second strand. In certain embodiments, a double-stranded compound comprises a first strand comprising the nucleobase sequence of any one of SEQ ID NOs: 13-2190 and a second strand. In certain embodiments, the double-stranded compound comprises ribonucleotides in which the first strand has uracil (U) in place of thymine (T) in any one of SEQ ID NOs: 13-2190. In certain embodiments, a double-stranded compound comprises (i) a first strand comprising a nucleobase sequence complementary to the site on KRAS to which any of SEQ ID NOs: 13-2190 is targeted, and (ii) a second strand. In certain embodiments, the double-stranded compound comprises one or more modified nucleotides in which the 2′ position in the sugar contains a halogen (such as fluorine group; 2′-F) or contains an alkoxy group (such as a methoxy group; 2′-OMe). In certain embodiments, the double-stranded compound comprises at least one 2′-F sugar modification and at least one 2′-OMe sugar modification. In certain embodiments, the at least one 2′-F sugar modification and at least one 2′-OMe sugar modification are arranged in an alternating pattern for at least 2, 3, 4, 5, 6, 7, 8, 9, 10, 11, 12, 13, 14, 15, 16, 17, 18, 19, or 20 contiguous nucleobases along a strand of the dsRNA compound. In certain embodiments, the double-stranded compound comprises one or more linkages between adjacent nucleotides other than a naturally-occurring phosphodiester linkage. Examples of such linkages include phosphoramide, phosphorothioate, and phosphorodithioate linkages. The double-stranded compounds may also be chemically modified nucleic acid molecules as taught in U.S. Pat. No. 6,673,661. In other embodiments, the dsRNA contains one or two capped strands, as disclosed, for example, by WO 00/63364, filed Apr. 19, 2000. In certain embodiments, the first strand of the double-stranded compound is an siRNA guide strand and the second strand of the double-stranded compound is an siRNA passenger strand. In certain embodiments, the second strand of the double-stranded compound is complementary to the first strand. In certain embodiments, each strand of the double-stranded compound consists of 16, 17, 18, 19, 20, 21, 22, or 23 linked nucleosides. In certain embodiments, the first or second strand of the double-stranded compound can comprise a conjugate group.

[0225] In certain embodiments, a single-stranded RNAi (ssRNAi) compound can comprise any of the oligonucleotide sequences targeted to KRAS described herein. In certain embodiments, an ssRNAi compound comprises at least an 8, 9, 10, 11, 12, 13, 14, 15, 16, 17, 18, 19, or 20 contiguous nucleobase portion of any one of SEQ ID NOs: 13-2190. In certain embodiments, an ssRNAi compound comprises the nucleobase sequence of any one of SEQ ID NOs: 13-2190. In certain embodiments, the ssRNAi compound comprises ribonucleotides in which uracil (U) is in place of thymine (T) in any one of SEQ ID NOs: 13-2190. In certain embodiments, an ssRNAi compound comprises a nucleobase sequence complementary to the site on KRAS to which any of SEQ ID NOs: 13-2190 is targeted. In certain embodiments, an ssRNAi compound comprises one or more modified nucleotides in which the 2′ position in the sugar contains a halogen (such as fluorine group; 2′-F) or contains an alkoxy group (such as a methoxy group; 2′-OMe). In certain embodiments, an ssRNAi compound comprises at least one 2′-F sugar modification and at least one 2′-OMe sugar modification. In certain embodiments, the at least one 2′-F sugar modification and at least one 2′-OMe sugar modification are arranged in an alternating pattern for at least 2, 3, 4, 5, 6, 7, 8, 9, 10, 11, 12, 13, 14, 15, 16, 17, 18, 19, or 20 contiguous nucleobases along a strand of the ssRNAi compound. In certain embodiments, the ssRNAi compound comprises one or more linkages between adjacent nucleotides other than a naturally-occurring phosphodiester linkage. Examples of such linkages include phosphoramide, phosphorothioate, and phosphorodithioate linkages. The ssRNAi compounds may also be chemically modified nucleic acid molecules as taught in U.S. Pat. No. 6,673,661. In other embodiments, the ssRNAi contains a capped strand, as disclosed, for example, by WO 00/63364, filed Apr. 19, 2000. In certain embodiments, the ssRNAi compound consists of 16, 17, 18, 19, 20, 21, 22, or 23 linked nucleosides. In certain embodiments, the ssRNAi compound can comprise a conjugate group.

[0226] In certain embodiments, antisense compounds comprise modified oligonucleotides. Certain modified oligonucleotides have one or more asymmetric center and thus give rise to enantiomers, diastereomers, and other stereoisomeric configurations that may be defined, in terms of absolute stereochemistry, as (R) or (S), as α or β such as for sugar anomers, or as (D) or (L) such as for amino acids etc. Included in the modified oligonucleotides provided herein are all such possible isomers, including their racemic and optically pure forms, unless specified otherwise. Likewise, all cis- and trans-isomers and tautomeric forms are also included.

### Certain Antisense Compound Mechanisms

[0227] In certain embodiments, antisense compounds are capable of hybridizing to a target nucleic acid, resulting in at least one antisense activity. In certain embodiments, antisense compounds specifically affect one or more target nucleic acid. Such specific antisense compounds comprises a nucleobase sequence that hybridizes to one or more target nucleic acid, resulting in one or more desired antisense activity and does not hybridize to one or more non-target nucleic acid or does not hybridize to one or more non-target nucleic acid in such a way that results in an undesired antisense activity.

[0228] In certain antisense activities, hybridization of an antisense compound to a target nucleic acid results in recruitment of a protein that cleaves the target nucleic acid. For example, certain antisense compounds result in RNase H mediated cleavage of the target nucleic acid. RNase H is a cellular endonuclease that cleaves the RNA strand of an RNA:DNA duplex. The DNA in such an RNA:DNA duplex need not be unmodified DNA. In certain embodiments, the invention provides antisense compounds that are sufficiently “DNA-like” to elicit RNase H activity. Further, in certain embodiments, one or more non-DNA-like nucleoside in the gap of a gapmer is tolerated.

[0229] In certain antisense activities, an antisense compound or a portion of an antisense compound is loaded into an RNA-induced silencing complex (RISC), ultimately resulting in cleavage of the target nucleic acid. For example, certain antisense compounds result in cleavage of the target nucleic acid by Argonaute. In certain embodiments, antisense compounds that are loaded into RISC are RNAi compounds.

[0230] In certain embodiments, hybridization of an antisense compound to a target nucleic acid does not result in recruitment of a protein that cleaves that target nucleic acid. In certain such embodiments, hybridization of the antisense compound to the target nucleic acid results in alteration of splicing of the target nucleic acid. In certain embodiments, hybridization of an antisense compound to a target nucleic acid results in inhibition of a binding interaction between the target nucleic acid and a protein or other nucleic acid. In certain such embodiments, hybridization of an antisense compound to a target nucleic acid results in alteration of translation of the target nucleic acid.

[0231] Antisense activities may be observed directly or indirectly. In certain embodiments, observation or detection of an antisense activity involves observation or detection of a change in an amount of a target nucleic acid or protein encoded by such target nucleic acid, a change in the ratio of splice variants of a nucleic acid or protein, and/or a phenotypic change in a cell or animal.

[0232] In certain embodiments, modified oligonucleotides having a gapmer sugar motif described herein have desirable properties compared to non-gapmer oligonucleotides or to gapmers having other sugar motifs. In certain circumstances, it is desirable to identify motifs resulting in a favorable combination of potent antisense activity and relatively low toxicity. In certain embodiments, compounds of the present invention have a favorable therapeutic index (measure of activity divided by measure of toxicity).

### Target Nucleic Acids, Target Regions and Nucleotide Sequences

[0233] In certain embodiments, antisense compounds comprise or consist of an oligonucleotide comprising a region that is complementary to a target nucleic acid. In certain embodiments, the target nucleic acid is an endogenous RNA molecule. In certain embodiments, the target nucleic acid encodes a protein. In certain such embodiments, the target nucleic acid is selected from: an mRNA and a pre-mRNA, including intronic, exonic and untranslated regions. In certain embodiments, the target RNA is an mRNA. In certain embodiments, the target nucleic acid is a pre-mRNA. In certain such embodiments, the target region is entirely within an intron. In certain embodiments, the target region spans an intron/exon junction. In certain embodiments, the target region is at least 50% within an intron.

[0234] Nucleotide sequences that encode KRAS include, without limitation, GENBANK Accession No. NM_004985.4 (incorporated by reference, disclosed herein as SEQ ID NO: 1); GENBANK Accession No. NT_009714.17_TRUNC_18116000_18166000_COMP (incorporated by reference, disclosed herein as SEQ ID NO: 2), and GENBANK Accession No. NM_033360.3 (incorporated by reference, disclosed herein as SEQ ID NO: 3).

### Hybridization

[0235] In some embodiments, hybridization occurs between an antisense compound disclosed herein and a KRAS nucleic acid. The most common mechanism of hybridization involves hydrogen bonding (e.g., Watson-Crick, Hoogsteen or reversed Hoogsteen hydrogen bonding) between complementary nucleobases of the nucleic acid molecules.

[0236] Hybridization can occur under varying conditions. Hybridization conditions are sequence-dependent and are determined by the nature and composition of the nucleic acid molecules to be hybridized.

[0237] Methods of determining whether a sequence is specifically hybridizable to a target nucleic acid are well known in the art. In certain embodiments, the antisense compounds provided herein are specifically hybridizable with a KRAS nucleic acid.

### Complementarity

[0238] An oligonucleotide is said to be complementary to another nucleic acid when the nucleobase sequence of such oligonucleotide or one or more regions thereof matches the nucleobase sequence of another oligonucleotide or nucleic acid or one or more regions thereof when the two nucleobase sequences are aligned in opposing directions. Nucleobase matches or complementary nucleobases, as described herein, are limited to adenine (A) and thymine (T), adenine (A) and uracil (U), cytosine (C) and guanine (G), and 5-methyl cytosine (mC) and guanine (G) unless otherwise specified. Complementary oligonucleotides and/or nucleic acids need not have nucleobase complementarity at each nucleoside and may include one or more nucleobase mismatches. An oligonucleotide is fully complementary or 100% complementary when such oligonucleotides have nucleobase matches at each nucleoside without any nucleobase mismatches.

[0239] Non-complementary nucleobases between an antisense compound and a KRAS nucleic acid may be tolerated provided that the antisense compound remains able to specifically hybridize to a target nucleic acid. Moreover, an antisense compound may hybridize over one or more segments of a KRAS nucleic acid such that intervening or adjacent segments are not involved in the hybridization event (e.g., a loop structure, mismatch or hairpin structure).

[0240] In certain embodiments, the antisense compounds provided herein, or a specified portion thereof, are, or are at least, 70%, 80%, 85%, 86%, 87%, 88%, 89%, 90%, 91%, 92%, 93%, 94%, 95%, 96%, 97%, 98%, 99%, or 100% complementary to a KRAS nucleic acid, a target region, target segment, or specified portion thereof. Percent complementarity of an antisense compound with a target nucleic acid can be determined using routine methods.

[0241] For example, an antisense compound in which 18 of 20 nucleobases of the antisense compound are complementary to a target region, and would therefore specifically hybridize, would represent 90 percent complementarity. In this example, the remaining non-complementary nucleobases may be clustered or interspersed with complementary nucleobases and need not be contiguous to each other or to complementary nucleobases. As such, an antisense compound which is 18 nucleobases in length having four non-complementary nucleobases which are flanked by two regions of complete complementarity with the target nucleic acid would have 77.8% overall complementarity with the target nucleic acid and would thus fall within the scope of the present invention. Percent complementarity of an antisense compound with a region of a target nucleic acid can be determined routinely using BLAST programs (basic local alignment search tools) and PowerBLAST programs known in the art (Altschul et al., J. Mol. Biol., 1990, 215, 403 410; Zhang and Madden, Genome Res., 1997, 7, 649 656). Percent homology, sequence identity or complementarity, can be determined by, for example, the Gap program (Wisconsin Sequence Analysis Package, Version 8 for Unix, Genetics Computer Group, University Research Park, Madison Wis.), using default settings, which uses the algorithm of Smith and Waterman (Adv. Appl. Math., 1981, 2, 482 489).

[0242] In certain embodiments, the antisense compounds provided herein, or specified portions thereof, are fully complementary (i.e. 100% complementary) to a target nucleic acid, or specified portion thereof. For example, an antisense compound may be fully complementary to a KRAS nucleic acid, or a target region, or a target segment or target sequence thereof. As used herein, “fully complementary” means each nucleobase of an antisense compound is capable of precise base pairing with the corresponding nucleobases of a target nucleic acid. For example, a 20 nucleobase antisense compound is fully complementary to a target sequence that is 400 nucleobases long, so long as there is a corresponding 20 nucleobase portion of the target nucleic acid that is fully complementary to the antisense compound. Fully complementary can also be used in reference to a specified portion of the first and/or the second nucleic acid. For example, a 20 nucleobase portion of a 30 nucleobase antisense compound can be “fully complementary” to a target sequence that is 400 nucleobases long. The 20 nucleobase portion of the 30 nucleobase oligonucleotide is fully complementary to the target sequence if the target sequence has a corresponding 20 nucleobase portion wherein each nucleobase is complementary to the 20 nucleobase portion of the antisense compound. At the same time, the entire 30 nucleobase antisense compound may or may not be fully complementary to the target sequence, depending on whether the remaining 10 nucleobases of the antisense compound are also complementary to the target sequence.

[0243] In certain embodiments, antisense compounds comprise one or more mismatched nucleobases relative to the target nucleic acid. In certain such embodiments, antisense activity against the target is reduced by such mismatch, but activity against a non-target is reduced by a greater amount. Thus, in certain such embodiments selectivity of the antisense compound is improved. In certain embodiments, the mismatch is specifically positioned within an oligonucleotide having a gapmer motif. In certain such embodiments, the mismatch is at position 1, 2, 3, 4, 5, 6, 7, or 8 from the 5′-end of the gap region. In certain such embodiments, the mismatch is at position 9, 8, 7, 6, 5, 4, 3, 2, 1 from the 3′-end of the gap region. In certain such embodiments, the mismatch is at position 1, 2, 3, or 4 from the 5′-end of the wing region. In certain such embodiments, the mismatch is at position 4, 3, 2, or 1 from the 3′-end of the wing region.

[0244] The location of a non-complementary nucleobase may be at the 5′ end or 3′ end of the antisense compound. Alternatively, the non-complementary nucleobase or nucleobases may be at an internal position of the antisense compound. When two or more non-complementary nucleobases are present, they may be contiguous (i.e. linked) or non-contiguous. In one embodiment, a non-complementary nucleobase is located in the wing segment of a gapmer antisense oligonucleotide.

[0245] In certain embodiments, antisense compounds that are, or are up to 11, 12, 13, 14, 15, 16, 17, 18, 19, or 20 nucleobases in length comprise no more than 4, no more than 3, no more than 2, or no more than 1 non-complementary nucleobase(s) relative to a target nucleic acid, such as a KRAS nucleic acid, or specified portion thereof.

[0246] In certain embodiments, antisense compounds that are, or are up to 11, 12, 13, 14, 15, 16, 17, 18, 19, 20, 21, 22, 23, 24, 25, 26, 27, 28, 29, or 30 nucleobases in length comprise no more than 6, no more than 5, no more than 4, no more than 3, no more than 2, or no more than 1 non-complementary nucleobase(s) relative to a target nucleic acid, such as a KRAS nucleic acid, or specified portion thereof.

[0247] The antisense compounds provided also include those which are complementary to a portion of a target nucleic acid. As used herein, “portion” refers to a defined number of contiguous (i.e. linked) nucleobases within a region or segment of a target nucleic acid. A “portion” can also refer to a defined number of contiguous nucleobases of an antisense compound. In certain embodiments, the antisense compounds, are complementary to at least an 8 nucleobase portion of a target segment. In certain embodiments, the antisense compounds are complementary to at least a 9 nucleobase portion of a target segment. In certain embodiments, the antisense compounds are complementary to at least a 10 nucleobase portion of a target segment. In certain embodiments, the antisense compounds are complementary to at least an 11 nucleobase portion of a target segment. In certain embodiments, the antisense compounds are complementary to at least a 12 nucleobase portion of a target segment. In certain embodiments, the antisense compounds are complementary to at least a 13 nucleobase portion of a target segment. In certain embodiments, the antisense compounds are complementary to at least a 14 nucleobase portion of a target segment. In certain embodiments, the antisense compounds are complementary to at least a 15 nucleobase portion of a target segment. In certain embodiments, the antisense compounds are complementary to at least a 16 nucleobase portion of a target segment. Also contemplated are antisense compounds that are complementary to at least a 9, 10, 11, 12, 13, 14, 15, 16, 17, 18, 19, 20, or more nucleobase portion of a target segment, or a range defined by any two of these values.

### Identity

[0248] The antisense compounds provided herein may also have a defined percent identity to a particular nucleotide sequence, SEQ ID NO, or compound represented by a specific Isis number, or portion thereof. As used herein, an antisense compound is identical to the sequence disclosed herein if it has the same nucleobase pairing ability. For example, a RNA which contains uracil in place of thymidine in a disclosed DNA sequence would be considered identical to the DNA sequence since both uracil and thymidine pair with adenine. Shortened and lengthened versions of the antisense compounds described herein as well as compounds having non-identical bases relative to the antisense compounds provided herein also are contemplated. The non-identical bases may be adjacent to each other or dispersed throughout the antisense compound. Percent identity of an antisense compound is calculated according to the number of bases that have identical base pairing relative to the sequence to which it is being compared.

[0249] In certain embodiments, the antisense compounds, or portions thereof, are, or are at least, 70%, 75%, 80%, 85%, 90%, 91%, 92%, 93%, 94%, 95%, 96%, 97%, 98%, 99% or 100% identical to one or more of the antisense compounds or SEQ ID NOs, or a portion thereof, disclosed herein.

[0250] In certain embodiments, a portion of the antisense compound is compared to an equal length portion of the target nucleic acid. In certain embodiments, an 8, 9, 10, 11, 12, 13, 14, 15, 16, 17, 18, 19, 20, 21, 22, 23, 24, or 25 nucleobase portion is compared to an equal length portion of the target nucleic acid.

[0251] In certain embodiments, a portion of the antisense oligonucleotide is compared to an equal length portion of the target nucleic acid. In certain embodiments, an 8, 9, 10, 11, 12, 13, 14, 15, 16, 17, 18, 19, 20, 21, 22, 23, 24, or 25 nucleobase portion is compared to an equal length portion of the target nucleic acid.

### Modifications

[0252] Modifications to antisense compounds encompass substitutions or changes to internucleoside linkages, sugar moieties, or nucleobases. Modified antisense compounds are often preferred over native forms because of desirable properties such as, for example, enhanced cellular uptake, enhanced affinity for nucleic acid target, increased stability in the presence of nucleases, or increased inhibitory activity.

[0253] Chemically modified nucleosides may also be employed to increase the binding affinity of a shortened or truncated antisense oligonucleotide for its target nucleic acid. Consequently, comparable results can often be obtained with shorter antisense compounds that have such chemically modified nucleosides.

### Modified Internucleoside Linkages

[0254] The naturally occurring internucleoside linkage of RNA and DNA is a 3′ to 5′ phosphodiester linkage. Antisense compounds having one or more modified, i.e. non-naturally occurring, internucleoside linkages are often selected over antisense compounds having naturally occurring internucleoside linkages because of desirable properties such as, for example, enhanced cellular uptake, enhanced affinity for target nucleic acids, and increased stability in the presence of nucleases.

[0255] Oligonucleotides having modified internucleoside linkages include internucleoside linkages that retain a phosphorus atom as well as internucleoside linkages that do not have a phosphorus atom. Representative phosphorus containing internucleoside linkages include, but are not limited to, phosphodiesters, phosphotriesters, methylphosphonates, phosphoramidate, and phosphorothioates. Methods of preparation of phosphorous-containing and non-phosphorous-containing linkages are well known.

[0256] In certain embodiments, nucleosides of modified oligonucleotides may be linked together using any internucleoside linkage. The two main classes of internucleoside linking groups are defined by the presence or absence of a phosphorus atom. Representative phosphorus-containing internucleoside linkages include but are not limited to phosphates, which contain a phosphodiester bond (“P═O”) (also referred to as unmodified or naturally occurring linkages), phosphotriesters, methylphosphonates, phosphoramidates, and phosphorothioates (“P═S”), and phosphorodithioates (“HS—P═S”). Representative non-phosphorus containing internucleoside linking groups include but are not limited to methylenemethylimino (—CH2-N(CH3)-O—CH2-), thiodiester (—O—C(═O)—S—), thionocarbamate (—O—C(═O)(NH)—S—); siloxane (—O—SiH2-O—); and N,N′-dimethylhydrazine (—CH2-N(CH3)-N(CH3)-). Modified internucleoside linkages, compared to naturally occurring phosphate linkages, can be used to alter, typically increase, nuclease resistance of the oligonucleotide. In certain embodiments, internucleoside linkages having a chiral atom can be prepared as a racemic mixture, or as separate enantiomers. Representative chiral internucleoside linkages include but are not limited to alkylphosphonates and phosphorothioates. Methods of preparation of phosphorous-containing and non-phosphorous-containing internucleoside linkages are well known to those skilled in the art.

[0257] Neutral internucleoside linkages include, without limitation, phosphotriesters, methylphosphonates, MMI (3′-CH2-N(CH3)-O-5′), amide-3 (3′-CH2-C(═O)—N(H)-5′), amide-4 (3′-CH2-N(H)—C(═O)-5′), formacetal (3′-O—CH2-O-5′), methoxypropyl, and thioformacetal (3′-S—CH2-O-5′). Further neutral internucleoside linkages include nonionic linkages comprising siloxane (dialkylsiloxane), carboxylate ester, carboxamide, sulfide, sulfonate ester and amides (See for example: Carbohydrate Modifications in Antisense Research; Y. S. Sanghvi and P. D. Cook, Eds., ACS Symposium Series 580; Chapters 3 and 4, 40-65). Further neutral internucleoside linkages include nonionic linkages comprising mixed N, O, S and CH2 component parts.

[0258] In certain embodiments, antisense compounds targeted to a KRAS nucleic acid comprise one or more modified internucleoside linkages. In certain embodiments, the modified internucleoside linkages are phosphorothioate linkages. In certain embodiments, each internucleoside linkage of an antisense compound is a phosphorothioate internucleoside linkage.

[0259] In certain embodiments, oligonucleotides comprise modified internucleoside linkages arranged along the oligonucleotide or region thereof in a defined pattern or modified internucleoside linkage motif. In certain embodiments, internucleoside linkages are arranged in a gapped motif. In such embodiments, the internucleoside linkages in each of two wing regions are different from the internucleoside linkages in the gap region. In certain embodiments the internucleoside linkages in the wings are phosphodiester and the internucleoside linkages in the gap are phosphorothioate. The nucleoside motif is independently selected, so such oligonucleotides having a gapped internucleoside linkage motif may or may not have a gapped nucleoside motif and if it does have a gapped nucleoside motif, the wing and gap lengths may or may not be the same.

[0260] In certain embodiments, oligonucleotides comprise a region having an alternating internucleoside linkage motif. In certain embodiments, oligonucleotides of the present invention comprise a region of uniformly modified internucleoside linkages. In certain such embodiments, the oligonucleotide comprises a region that is uniformly linked by phosphorothioate internucleoside linkages. In certain embodiments, the oligonucleotide is uniformly linked by phosphorothioate. In certain embodiments, each internucleoside linkage of the oligonucleotide is selected from phosphodiester and phosphorothioate. In certain embodiments, each internucleoside linkage of the oligonucleotide is selected from phosphodiester and phosphorothioate and at least one internucleoside linkage is phosphorothioate.

[0261] In certain embodiments, the oligonucleotide comprises at least 6 phosphorothioate internucleoside linkages. In certain embodiments, the oligonucleotide comprises at least 8 phosphorothioate internucleoside linkages. In certain embodiments, the oligonucleotide comprises at least 10 phosphorothioate internucleoside linkages. In certain embodiments, the oligonucleotide comprises at least one block of at least 6 consecutive phosphorothioate internucleoside linkages. In certain embodiments, the oligonucleotide comprises at least one block of at least 8 consecutive phosphorothioate internucleoside linkages. In certain embodiments, the oligonucleotide comprises at least one block of at least 10 consecutive phosphorothioate internucleoside linkages. In certain embodiments, the oligonucleotide comprises at least one block of at least 12 consecutive phosphorothioate internucleoside linkages. In certain such embodiments, at least one such block is located at the 3′ end of the oligonucleotide. In certain such embodiments, at least one such block is located within 3 nucleosides of the 3′ end of the oligonucleotide.

[0262] In certain embodiments, oligonucleotides comprise one or more methylphosponate linkages. In certain embodiments, oligonucleotides having a gapmer nucleoside motif comprise a linkage motif comprising all phosphorothioate linkages except for one or two methylphosponate linkages. In certain embodiments, one methylphosponate linkage is in the central gap of an oligonucleotide having a gapmer nucleoside motif.

[0263] In certain embodiments, it is desirable to arrange the number of phosphorothioate internucleoside linkages and phosphodiester internucleoside linkages to maintain nuclease resistance. In certain embodiments, it is desirable to arrange the number and position of phosphorothioate internucleoside linkages and the number and position of phosphodiester internucleoside linkages to maintain nuclease resistance. In certain embodiments, the number of phosphorothioate internucleoside linkages may be decreased and the number of phosphodiester internucleoside linkages may be increased. In certain embodiments, the number of phosphorothioate internucleoside linkages may be decreased and the number of phosphodiester internucleoside linkages may be increased while still maintaining nuclease resistance. In certain embodiments it is desirable to decrease the number of phosphorothioate internucleoside linkages while retaining nuclease resistance. In certain embodiments it is desirable to increase the number of phosphodiester internucleoside linkages while retaining nuclease resistance.

### Modified Sugar Moieties

[0264] Antisense compounds can optionally contain one or more nucleosides wherein the sugar group has been modified. Such sugar modified nucleosides may impart enhanced nuclease stability, increased binding affinity, or some other beneficial biological property to the antisense compounds.

[0265] In certain embodiments, modified oligonucleotides comprise one or more modified nucleosides comprising a modified sugar moiety. Such modified oligonucleotides comprising one or more sugar-modified nucleosides may have desirable properties, such as enhanced nuclease stability or increased binding affinity with a target nucleic acid relative to oligonucleotides lacking such sugar-modified nucleosides. In certain embodiments, modified sugar moieties are linearly modified sugar moieties. In certain embodiments, modified sugar moieties are bicyclic or tricyclic sugar moieties. In certain embodiments, modified sugar moieties are sugar surrogates. Such sugar surrogates may comprise one or more substitutions corresponding to those of substituted sugar moieties.

[0266] In certain embodiments, modified sugar moieties are linearly modified sugar moieties comprising a furanosyl ring with one or more acyclic substituent, including but not limited to substituents at the 2′ and/or 5′ positions. Examples of 2′-substituent groups suitable for linearly modified sugar moieties include but are not limited to: 2′-F, 2′-OCH₃ (“OMe” or “O-methyl”), and 2′-O(CH₂)₂OCH₃ (“MOE”). In certain embodiments, 2′-substituent groups are selected from among: halo, allyl, amino, azido, SH, CN, OCN, CF₃, OCF₃, O—C₁-C₁₀ alkoxy, O—C₁-C₁₀ substituted alkoxy, O—C₁-C₁₀ alkyl, O—C₁-C₁₀ substituted alkyl, S-alkyl, N(Rₘ)-alkyl, O-alkenyl, S-alkenyl, N(Rₘ)-alkenyl, O-alkynyl, S-alkynyl, N(Rₘ)-alkynyl, O-alkylenyl-O-alkyl, alkynyl, alkaryl, aralkyl, O-alkaryl, O-aralkyl, O(CH₂)₂SCH₃, O(CH₂)₂ON(Rₘ)(Rₙ) or OCH₂C(═O)—N(Rₘ)(Rₙ), where each Rₘ and Rₙ is, independently, H, an amino protecting group, or substituted or unsubstituted C₁-C₁₀ alkyl. Certain embodiments of these 2′-substituent groups can be further substituted with one or more substituent groups independently selected from among: hydroxyl, amino, alkoxy, carboxy, benzyl, phenyl, nitro (NO₂), thiol, thioalkoxy, thioalkyl, halogen, alkyl, aryl, alkenyl and alkynyl. Examples of 5′-substituent groups suitable for linearly modified sugar moieties include but are not limited to: 5′-methyl (R or S), 5′-vinyl, and 5′-methoxy. In certain embodiments, linearly modified sugars comprise more than one non-bridging sugar substituent, for example, 2′-F-5′-methyl sugar moieties (see, e.g., PCT International Application WO 2008/101157, for additional 2′, 5′-bis substituted sugar moieties and nucleosides).

[0267] In certain embodiments, a 2′-substituted nucleoside or 2′-linearly modified nucleoside comprises a sugar moiety comprising a linear 2′-substituent group selected from: F, NH₂, N₃, OCF₃, OCH₃, O(CH₂)₃NH₂, CH₂CH═CH₂, OCH₂CH═CH₂, OCH₂CH₂OCH₃, O(CH₂)₂SCH₃, O(CH₂)₂₀N(Rₘ)(Rₙ), O(CH₂)₂O(CH₂)₂N(CH₃)₂, and N-substituted acetamide (OCH₂C(═O)—N(Rₘ)(Rₙ)), where each Rₘ and Rₙ is, independently, H, an amino protecting group, or substituted or unsubstituted C₁-C₁₀ alkyl.

[0268] In certain embodiments, a 2′-substituted nucleoside or 2′-linearly modified nucleoside comprises a sugar moiety comprising a linear 2′-substituent group selected from: F, OCF₃, OCH₃, OCH₂CH₂OCH₃, O(CH₂)₂SCH₃, O(CH₂)₂₀N(CH₃)₂, O(CH₂)₂O(CH₂)₂N(CH₃)₂, and OCH₂C(═O)—N(H)CH₃ (“NMA”).

[0269] In certain embodiments, a 2′-substituted nucleoside or 2′-linearly modified nucleoside comprises a sugar moiety comprising a linear 2′-substituent group selected from: F, OCH₃, and OCH₂CH₂OCH₃.

[0270] Nucleosides comprising modified sugar moieties, such as linearly modified sugar moieties, are referred to by the position(s) of the substitution(s) on the sugar moiety of the nucleoside. For example, nucleosides comprising 2′-substituted or 2-modified sugar moieties are referred to as 2′-substituted nucleosides or 2-modified nucleosides.

[0271] Certain modified sugar moieties comprise a bridging sugar substituent that forms a second ring resulting in a bicyclic sugar moiety. In certain such embodiments, the bicyclic sugar moiety comprises a bridge between the 4′ and the 2′ furanose ring atoms. Examples of such 4′ to 2′ bridging sugar substituents include but are not limited to: 4′-CH₂-2′, 4′-(CH₂)₂-2′, 4′-(CH₂)₃-2′, 4′-CH₂—O-2′ (“LNA”), 4′-CH₂—S-2′, 4′-(CH₂)₂-O-2′ (“ENA”), 4′-CH(CH₃)—O-2′ (referred to as “constrained ethyl” or “cEt” when in the S configuration), 4′-CH₂—O—CH₂-2′, 4′-CH₂—N(R)-2′, 4′-CH(CH₂OCH₃)—O-2′ (“constrained MOE” or “cMOE”) and analogs thereof (see, e.g., U.S. Pat. No. 7,399,845), 4′-C(CH₃)(CH₃)—O-2′ and analogs thereof (see, e.g., WO2009/006478), 4′-CH₂—N(OCH₃)-2′ and analogs thereof (see, e.g., WO2008/150729), 4′-CH₂—O—N(CH₃)-2′ (see, e.g., US2004/0171570), 4′-CH₂—C(H)(CH₃)-2′ (see, e.g., Chattopadhyaya, et al., J. Org. Chem., 2009, 74, 118-134), 4′-CH₂—C(═CH₂)-2′ and analogs thereof (see, published PCT International Application WO 2008/154401), 4′-C(RₐR_{b})—N(R)—O-2′, 4′-C(RₐR_{b})—O—N(R)-2′, 4′-CH₂—O—N(R)-2′, and 4′-CH₂—N(R)—O-2′, wherein each R, Rₐ, and R_{b} is, independently, H, a protecting group, or C₁-C₁₂ alkyl (see, e.g. U.S. Pat. No. 7,427,672).

[0272] In certain embodiments, such 4′ to 2′ bridges independently comprise from 1 to 4 linked groups independently selected from: —[C(Rₐ)(R_{b})]ₙ—, —[C(Rₐ)(R_{b})]ₙ—O—, —C(Rₐ)═C(R_{b})—, —C(Rₐ)═N—, —C(═NRₐ)—, —C(═O)—, —C(═S)—, —O—, —Si(Rₐ)₂—, —S(═O)ₓ—, and —N(Rₐ)—;

[0273] wherein:

[0274] x is 0, 1, or 2;

[0275] n is 1, 2, 3, or 4;

[0276] each Rₐ and R_{b} is, independently, H, a protecting group, hydroxyl, C₁-C₁₂ alkyl, substituted C₁-C₁₂ alkyl, C₂-C₁₂ alkenyl, substituted C₂-C₁₂ alkenyl, C₂-C₁₂ alkynyl, substituted C₂-C₁₂ alkynyl, C₅-C₂₀ aryl, substituted C₅-C₂₀ aryl, heterocycle radical, substituted heterocycle radical, heteroaryl, substituted heteroaryl, C₅-C₇ alicyclic radical, substituted C₅-C₇ alicyclic radical, halogen, OJ₁, NJ₁J₂, SJ₁, N₃, COOJ₁, acyl (C(═O)—H), substituted acyl, CN, sulfonyl (S(═O)₂-Jᵣ), or sulfoxyl (S(═O)-J₁); and

[0277] each J₁ and J₂ is, independently, H, C₁-C₁₂ alkyl, substituted C₁-C₁₂ alkyl, C₂-C₁₂ alkenyl, substituted C₂-C₁₂ alkenyl, C₂-C₁₂ alkynyl, substituted C₂-C₁₂ alkynyl, C₅-C₂₀ aryl, substituted C₅-C₂₀ aryl, acyl (C(═O)—H), substituted acyl, a heterocycle radical, a substituted heterocycle radical, Cᵣ-Cᵤ aminoalkyl, substituted C₁-C₁₂ aminoalkyl, or a protecting group.

[0278] Additional bicyclic sugar moieties are known in the art, for example: Freier et al., Nucleic Acids Research, 1997, 25(22), 4429-4443, Albaek et al., J. Org. Chem., 2006, 71, 7731-7740, Singh et al., Chem. Commun., 1998, 4, 455-456; Koshkin et al., Tetrahedron, 1998, 54, 3607-3630; Wahlestedt et al., Proc. Natl. Acad. Sci. U.S.A, 2000, 97, 5633-5638; Kumar et al., Bioorg. Med. Chem. Lett., 1998, 8, 2219-2222; Singh et al., J. Org. Chem., 1998, 63, 10035-10039; Srivastava et al., J. Am. Chem. Soc., 20017, 129, 8362-8379; Elayadi et al., Curr. Opinion Invens. Drugs, 2001, 2, 558-561; Braasch et al., Chem. Biol., 2001, 8, 1-7; Orum et al., Curr. Opinion Mol. Ther., 2001, 3, 239-243; U.S. Pat. Nos. 7,053,207, 6,268,490, 6,770,748, 6,794,499, 7,034,133, 6,525,191, 6,670,461, and 7,399,845; WO 2004/106356, WO 1994/14226, WO 2005/021570, and WO 2007/134181; U.S. Patent Publication Nos. U52004/0171570, U52007/0287831, and U52008/0039618; U.S. patent Ser. Nos. 12/129,154, 60/989,574, 61/026,995, 61/026,998, 61/056,564, 61/086,231, 61/097,787, and 61/099,844; and PCT International Applications Nos. PCT/US2008/064591, PCT/US2008/066154, and PCT/US2008/068922.

[0279] In certain embodiments, bicyclic sugar moieties and nucleosides incorporating such bicyclic sugar moieties are further defined by isomeric configuration. For example, an LNA nucleoside (described above) may be in the α-L configuration or in the β-D configuration.

[chemical structure]

α-L-methyleneoxy (4′-CH₂—O-2′) or α-L-LNA bicyclic nucleosides have been incorporated into antisense oligonucleotides that showed antisense activity (Frieden et al., Nucleic Acids Research, 2003, 21, 6365-6372). Herein, general descriptions of bicyclic nucleosides include both isomeric configurations. When the positions of specific bicyclic nucleosides (e.g., LNA or cEt) are identified in exemplified embodiments herein, they are in the β-D configuration, unless otherwise specified.

[0280] In certain embodiments, modified sugar moieties comprise one or more non-bridging sugar substituent and one or more bridging sugar substituent (e.g., 5′-substituted and 4′-2′ bridged sugars). (see, e.g., WO 2007/134181, wherein LNA nucleosides are further substituted with, for example, a 5′-methyl or a 5′-vinyl group, and see, e.g., U.S. Pat. Nos. 7,547,684; 7,750,131; 8,030,467; 8,268,980; 7,666, 854; and 8,088,746).

[0281] In certain embodiments, modified sugar moieties are sugar surrogates. In certain such embodiments, the oxygen atom of the sugar moiety is replaced, e.g., with a sulfur, carbon or nitrogen atom. In certain such embodiments, such modified sugar moieties also comprise bridging and/or non-bridging substituents as described above. For example, certain sugar surrogates comprise a 4′-sulfur atom and a substitution at the 2′-position (see, e.g., US2005/0130923) and/or the 5′ position.

[0282] In certain embodiments, sugar surrogates comprise rings having other than 5 atoms. For example, in certain embodiments, a sugar surrogate comprises a six-membered tetrahydropyran (“THP”). Such tetrahydropyrans may be further modified or substituted. Nucleosides comprising such modified tetrahydropyrans include but are not limited to hexitol nucleic acid (“HNA”), anitol nucleic acid (“ANA”), manitol nucleic acid (“MNA”) (see Leumann, C J. Bioorg. & Med. Chem. 2002, 10, 841-854), fluoro HNA:

[chemical structure]

(“F-HNA”, see e.g., U.S. Pat. Nos. 8,088,904; 8,440,803; and 8,796,437, F-HNA can also be referred to as a F-THP or 3′-fluoro tetrahydropyran), and nucleosides comprising additional modified THP compounds having the formula:

[chemical structure]

wherein, independently, for each of said modified THP nucleoside:

[0283] Bx is a nucleobase moiety;

[0284] T₃ and T₄ are each, independently, an internucleoside linking group linking the modified THP nucleoside to the remainder of an oligonucleotide or one of T₃ and T₄ is an internucleoside linking group linking the modified THP nucleoside to the remainder of an oligonucleotide and the other of T₃ and T₄ is H, a hydroxyl protecting group, a linked conjugate group, or a 5′ or 3′-terminal group;

q₁, q₂, q₃, q₄, q₅, q₆ and q₇ are each, independently, H, C₁-C₆ alkyl, substituted C₁-C₆ alkyl, C₂-C₆ alkenyl, substituted C₂-C₆ alkenyl, C₂-C₆ alkynyl, or substituted C₂-C₆ alkynyl; and

[0285] each of R₁ and R₂ is independently selected from among: hydrogen, halogen, substituted or unsubstituted alkoxy, NJ₁J₂, SJ₁, N₃, OC(═X)J₁, OC(═X)NJ₁J₂, NJ₃C(═X)NJ₁J₂, and CN, wherein X is O, S or NJ₁, and each J₁, J₂, and J₃ is, independently, H or C₁-C₆ alkyl.

[0286] In certain embodiments, modified THP nucleosides are provided wherein q₁, q₂, q₃, q₄, q₅, q₆ and q₇ are each H. In certain embodiments, at least one of q₁, q₂, q₃, q₄, q₅, q₆ and q₇ is other than H. In certain embodiments, at least one of q₁, q₂, q₃, q₄, q₅, q₆ and q₇ is methyl. In certain embodiments, modified THP nucleosides are provided wherein one of R₁ and R₂ is F. In certain embodiments, R₁ is F and R₂ is H, in certain embodiments, R₁ is methoxy and R₂ is H, and in certain embodiments, R₁ is methoxyethoxy and R₂ is H.

[0287] In certain embodiments, sugar surrogates comprise rings having more than 5 atoms and more than one heteroatom. For example, nucleosides comprising morpholino sugar moieties and their use in oligonucleotides have been reported (see, e.g., Braasch et al., Biochemistry, 2002, 41, 4503-4510 and U.S. Pat. Nos. 5,698,685; 5,166,315; 5,185,444; and 5,034,506). As used here, the term “morpholino” means a sugar surrogate having the following structure:

[chemical structure]

In certain embodiments, morpholinos may be modified, for example by adding or altering various substituent groups from the above morpholino structure. Such sugar surrogates are referred to herein as “modified morpholinos.”

[0288] In certain embodiments, sugar surrogates comprise acyclic moieites. Examples of nucleosides and oligonucleotieds comprising such acyclic sugar surrogates include but are not limited to: peptide nucleic acid (“PNA”), acyclic butyl nucleic acid (see, e.g., Kumar et al., Org. Biomol. Chem., 2013, 11, 5853-5865), and nucleosides and oligonucleotides described in WO2011/133876.

[0289] Many other bicyclic and tricyclic sugar and sugar surrogate ring systems are known in the art that can be used in modified nucleosides (see, e.g., Leumann, J. C, Bioorganic & Medicinal Chemistry, 2002, 10, 841-854).

### Modified Nucleobases

[0290] Nucleobase (or base) modifications or substitutions are structurally distinguishable from, yet functionally interchangeable with, naturally occurring or synthetic unmodified nucleobases. Both natural and modified nucleobases are capable of participating in hydrogen bonding. Such nucleobase modifications can impart nuclease stability, binding affinity or some other beneficial biological property to antisense compounds.

[0291] In certain embodiments, modified oligonucleotides comprise one or more nucleoside comprising an unmodified nucleobase. In certain embodiments, modified oligonucleotides comprise one or more nucleoside comprising a modified nucleobase. In certain embodiments, modified oligonucleotides comprise one or more nucleoside that does not comprise a nucleobase, referred to as an abasic nucleoside.

[0292] In certain embodiments, modified nucleobases are selected from: 5-substituted pyrimidines, 6-azapyrimi-idines, alkyl or alkynyl substituted pyrimidines, alkyl substituted purines, and N-2, N-6 and 0-6 substituted purines. In certain embodiments, modified nucleobases are selected from: 2-aminopropyladenine, 5-hydroxymethyl cytosine, 5-methylcytosine, xanthine, hypoxanthine, 2-aminoadenine, 6-N-methylguanine, 6-N-methyladenine, 2-propyladenine, 2-thiouracil, 2-thiothymine and 2-thiocytosine, 5-propynyl (C≡C—CH₃) uracil, 5-propynylcytosine, 6-azouracil, 6-azocytosine, 6-azothymine, 5-ribosyluracil (pseudouracil), 4-thiouracil, 8-halo, 8-amino, 8-thiol, 8-thioalkyl, 8-hydroxyl, 8-aza and other 8-substituted purines, 5-halo, particularly 5-bromo, 5-trifluoromethyl, 5-halouracil, and 5-halocytosine, 7-methylguanine, 7-methyladenine, 2-F-adenine, 2-aminoadenine, 7-deazaguanine, 7-deazaadenine, 3-deazaguanine, 3-deazaadenine, 6-N-benzoyladenine, 2-N-isobutyrylguanine, 4-N-benzoylcytosine, 4-N-benzoyluracil, 5-methyl 4-N-benzoylcytosine, 5-methyl 4-N-benzoyluracil, universal bases, hydrophobic bases, promiscuous bases, size-expanded bases, and fluorinated bases. Further modified nucleobases include tricyclic pyrimidines, such as 1,3-diazaphenoxazine-2-one, 1,3-diazaphenothiazine-2-one and 9-(2-aminoethoxy)-1,3-diazaphenoxazine-2-one (G-clamp). Modified nucleobases may also include those in which the purine or pyrimidine base is replaced with other heterocycles, for example 7-deaza-adenine, 7-deazaguanosine, 2-aminopyridine and 2-pyridone. Further nucleobases include those disclosed in U.S. Pat. No. 3,687,808, those disclosed in The Concise Encyclopedia Of Polymer Science And Engineering, Kroschwitz, J. I., Ed., John Wiley & Sons, 1990, 858-859; Englisch et al., Angewandte Chemie, International Edition, 1991, 30, 613; Sanghvi, Y. S., Chapter 15, Antisense Research and Applications, Crooke, S. T. and Lebleu, B., Eds., CRC Press, 1993, 273-288; and those disclosed in Chapters 6 and 15, Antisense Drug Technology, Crooke S. T., Ed., CRC Press, 2008, 163-166 and 442-443.

[0293] Publications that teach the preparation of certain of the above noted modified nucleobases as well as other modified nucleobases include without limitation, Manoharan et al., U52003/0158403, Manoharan et al., U52003/0175906; Dinh et al., U.S. Pat. No. 4,845,205; Spielvogel et al., U.S. Pat. No. 5,130,302; Rogers et al., U.S. 5,134,066; Bischofberger et al., U.S. Pat. No. 5,175,273; Urdea et al., U.S. Pat. No. 5,367,066; Benner et al., U.S. Pat. No. 5,432,272; Matteucci et al., U.S. Pat. No. 5,434,257; Gmeiner et al., U.S. Pat. No. 5,457,187; Cook et al., U.S. Pat. No. 5,459,255; Froehler et al., U.S. Pat. No. 5,484,908; Matteucci et al., U.S. Pat. No. 5,502,177; Hawkins et al., U.S. Pat. No. 5,525,711; Haralambidis et al., U.S. Pat. No. 5,552,540; Cook et al., U.S. Pat. No. 5,587,469; Froehler et al., U.S. Pat. No. 5,594,121; Switzer et al., U.S. Pat. No. 5,596,091; Cook et al., U.S. Pat. No. 5,614,617; Froehler et al., U.S. Pat. No. 5,645,985; Cook et al., U.S. Pat. No. 5,681,941; Cook et al., U.S. Pat. No. 5,811,534; Cook et al., U.S. Pat. No. 5,750,692; Cook et al., U.S. Pat. No. 5,948,903; Cook et al., U.S. Pat. No. 5,587,470; Cook et al., U.S. Pat. No. 5,457,191; Matteucci et al., U.S. Pat. No. 5,763,588; Froehler et al., U.S. Pat. No. 5,830,653; Cook et al., U.S. Pat. No. 5,808,027; Cook et al., 6,166,199; and Matteucci et al., U.S. Pat. No. 6,005,096.

[0294] In certain embodiments, antisense compounds targeted to a KRAS nucleic acid comprise one or more modified nucleobases. In certain embodiments, the modified nucleobase is 5-methylcytosine. In certain embodiments, each cytosine is a 5-methylcytosine.

### Certain Motifs

[0295] Oligonucleotides can have a motif, e.g. a pattern of unmodified and/or modified sugar moieties, nucleobases, and/or internucleoside linkages. In certain embodiments, modified oligonucleotides comprise one or more modified nucleoside comprising a modified sugar. In certain embodiments, modified oligonucleotides comprise one or more modified nucleosides comprising a modified nucleobase. In certain embodiments, modified oligonucleotides comprise one or more modified internucleoside linkage. In such embodiments, the modified, unmodified, and differently modified sugar moieties, nucleobases, and/or internucleoside linkages of a modified oligonucleotide define a pattern or motif. In certain embodiments, the patterns of sugar moieties, nucleobases, and internucleoside linkages are each independent of one another. Thus, a modified oligonucleotide may be described by its sugar motif, nucleobase motif and/or internucleoside linkage motif (as used herein, nucleobase motif describes the modifications to the nucleobases independent of the sequence of nucleobases).

[0296] 1. Certain Sugar Motifs

[0297] In certain embodiments, oligonucleotides comprise one or more type of modified sugar and/or unmodified sugar moiety arranged along the oligonucleotide or region thereof in a defined pattern or sugar motif. In certain instances, such sugar motifs include but are not limited to any of the sugar modifications discussed herein.

[0298] In certain embodiments, modified oligonucleotides comprise or consist of a region having a gapmer motif, which comprises two external regions or “wings” and a central or internal region or “gap.” The three regions of a gapmer motif (the 5′-wing, the gap, and the 3′-wing) form a contiguous sequence of nucleosides wherein at least some of the sugar moieties of the nucleosides of each of the wings differ from at least some of the sugar moieties of the nucleosides of the gap. Specifically, at least the sugar moieties of the nucleosides of each wing that are closest to the gap (the 3′-most nucleoside of the 5′-wing and the 5′-most nucleoside of the 3′-wing) differ from the sugar moiety of the neighboring gap nucleosides, thus defining the boundary between the wings and the gap (i.e., the wing/gap junction). In certain embodiments, the sugar moieties within the gap are the same as one another. In certain embodiments, the gap includes one or more nucleoside having a sugar moiety that differs from the sugar moiety of one or more other nucleosides of the gap. In certain embodiments, the sugar motifs of the two wings are the same as one another (symmetric gapmer). In certain embodiments, the sugar motif of the 5′-wing differs from the sugar motif of the 3′-wing (asymmetric gapmer).

[0299] In certain embodiments, the wings of a gapmer comprise 1-5 nucleosides. In certain embodiments, the wings of a gapmer comprise 2-5 nucleosides. In certain embodiments, the wings of a gapmer comprise 3-5 nucleosides. In certain embodiments, the nucleosides of a gapmer are all modified nucleosides.

[0300] In certain embodiments, the gap of a gapmer comprises 7-12 nucleosides. In certain embodiments, the gap of a gapmer comprises 7-10 nucleosides. In certain embodiments, the gap of a gapmer comprises 8-10 nucleosides. In certain embodiments, the gap of a gapmer comprises 10 nucleosides. In certain embodiment, each nucleoside of the gap of a gapmer is an unmodified 2′-deoxy nucleoside.

[0301] In certain embodiments, the gapmer is a deoxy gapmer. In such embodiments, the nucleosides on the gap side of each wing/gap junction are unmodified 2′-deoxy nucleosides and the nucleosides on the wing sides of each wing/gap junction are modified nucleosides. In certain such embodiments, each nucleoside of the gap is an unmodified 2′-deoxy nucleoside. In certain such embodiments, each nucleoside of each wing is a modified nucleoside.

[0302] In certain embodiments, modified oligonucleotides comprise or consist of a region having a fully modified sugar motif. In such embodiments, each nucleoside of the fully modified region of the modified oligonucleotide comprises a modified sugar moiety. In certain such embodiments, each nucleoside to the entire modified oligonucleotide comprises a modified sugar moiety. In certain embodiments, modified oligonucleotides comprise or consist of a region having a fully modified sugar motif, wherein each nucleoside within the fully modified region comprises the same modified sugar moiety, referred to herein as a uniformly modified sugar motif. In certain embodiments, a fully modified oligonucleotide is a uniformly modified oligonucleotide. In certain embodiments, each nucleoside of a uniformly modified comprises the same 2′-modification.

[0303] 2. Certain Nucleobase Motifs

[0304] In certain embodiments, oligonucleotides comprise modified and/or unmodified nucleobases arranged along the oligonucleotide or region thereof in a defined pattern or motif. In certain embodiments, each nucleobase is modified. In certain embodiments, none of the nucleobases are modified. In certain embodiments, each purine or each pyrimidine is modified. In certain embodiments, each adenine is modified. In certain embodiments, each guanine is modified. In certain embodiments, each thymine is modified. In certain embodiments, each uracil is modified. In certain embodiments, each cytosine is modified. In certain embodiments, some or all of the cytosine nucleobases in a modified oligonucleotide are 5-methylcytosines.

[0305] In certain embodiments, modified oligonucleotides comprise a block of modified nucleobases. In certain such embodiments, the block is at the 3′-end of the oligonucleotide. In certain embodiments the block is within 3 nucleosides of the 3′-end of the oligonucleotide. In certain embodiments, the block is at the 5′-end of the oligonucleotide. In certain embodiments the block is within 3 nucleosides of the 5′-end of the oligonucleotide.

[0306] In certain embodiments, oligonucleotides having a gapmer motif comprise a nucleoside comprising a modified nucleobase. In certain such embodiments, one nucleoside comprising a modified nucleobase is in the central gap of an oligonucleotide having a gapmer motif. In certain such embodiments, the sugar moiety of said nucleoside is a 2′-deoxyribosyl moiety. In certain embodiments, the modified nucleobase is selected from: a 2-thiopyrimidine and a 5-propynepyrimidine.

[0307] 3. Certain Internucleoside Linkage Motifs

[0308] In certain embodiments, oligonucleotides comprise modified and/or unmodified internucleoside linkages arranged along the oligonucleotide or region thereof in a defined pattern or motif. In certain embodiments, essentially each internucleoside linking group is a phosphate internucleoside linkage (P═O). In certain embodiments, each internucleoside linking group of a modified oligonucleotide is a phosphorothioate (P═S). In certain embodiments, each internucleoside linking group of a modified oligonucleotide is independently selected from a phosphorothioate and phosphate internucleoside linkage. In certain embodiments, the sugar motif of a modified oligonucleotide is a gapmer and the internucleoside linkages within the gap are all modified. In certain such embodiments, some or all of the internucleoside linkages in the wings are unmodified phosphate linkages. In certain embodiments, the terminal internucleoside linkages are modified.

### Certain Oligonucleotides

[0309] In certain embodiments, oligonucleotides are characterized by their motifs and overall lengths. In certain embodiments, such parameters are each independent of one another. Thus, unless otherwise indicated, each internucleoside linkage of an oligonucleotide having a gapmer motif may be modified or unmodified and may or may not follow the gapmer modification pattern of the sugar modifications. For example, the internucleoside linkages within the wing regions of a gapmer may be the same or different from one another and may be the same or different from the internucleoside linkages of the gap region. Likewise, such gapmer oligonucleotides may comprise one or more modified nucleobase independent of the gapmer pattern of the sugar modifications. Furthermore, unless otherwise indicated, each internucleoside linkage and each nucleobase of a fully modified oligonucleotide may be modified or unmodified. One of skill in the art will appreciate that such motifs may be combined to create a variety of oligonucleotides. Herein, if a description of an oligonucleotide is silent with respect to one or more parameter, such parameter is not limited. Thus, a modified oligonucleotide described only as having a gapmer motif without further description may have any length, internucleoside linkage motif, and nucleobase motif. Unless otherwise indicated, all modifications are independent of nucleobase sequence.

[0310] In certain embodiments, oligonucleotides have a nucleobase sequence that is complementary to a second oligonucleotide or a target nucleic acid. In certain such embodiments, a region of an oligonucleotide has a nucleobase sequence that is complementary to a second oligonucleotide or a target nucleic acid. In certain embodiments, the nucleobase sequence of a region or entire length of an oligonucleotide is at least 50%, at least 60%, at least 70%, at least 80%, at least 90%, at least 95%, or 100% complementary to the second oligonucleotide or target nucleic acid. In certain embodiments, antisense compounds comprise two oligomeric compounds, wherein the two oligonucleotides of the oligomeric compounds are at least 80%, at least 90%, or 100% complementary to each other. In certain embodiments, one or both oligonucleotides of a double-stranded antisense compound comprise two nucleosides that are not complementary to the other oligonucleotide.

### Certain Conjugate Groups and Terminal Groups

[0311] In certain embodiments, antisense compounds and oligomeric compounds comprise conjugate groups and/or terminal groups. In certain such embodiments, oligonucleotides are covalently attached to one or more conjugate group. In certain embodiments, conjugate groups modify one or more properties of the attached oligonucleotide, including but not limited to pharmacodynamics, pharmacokinetics, stability, binding, absorption, cellular distribution, cellular uptake, charge and clearance. In certain embodiments, conjugate groups impart a new property on the attached oligonucleotide, e.g., fluorophores or reporter groups that enable detection of the oligonucleotide. Conjugate groups and/or terminal groups may be added to oligonucleotides having any of the modifications or motifs described above. Thus, for example, an antisense compound or oligomeric compound comprising an oligonucleotide having a gapmer motif may also comprise a conjugate group.

[0312] Conjugate groups include, without limitation, intercalators, reporter molecules, polyamines, polyamides, peptides, carbohydrates, vitamin moieties, polyethylene glycols, thioethers, polyethers, cholesterols, thiocholesterols, cholic acid moieties, folate, lipids, phospholipids, biotin, phenazine, phenanthridine, anthraquinone, adamantane, acridine, fluoresceins, rhodamines, coumarins, fluorophores, and dyes. Certain conjugate groups have been described previously, for example: cholesterol moiety (Letsinger et al., Proc. Natl. Acad. Sci. USA, 1989, 86, 6553-6556), cholic acid (Manoharan et al., Bioorg. Med. Chem. Lett., 1994, 4, 1053-1060), a thioether, e.g., hexyl-S-tritylthiol (Manoharan et al., Ann. N.Y. Acad. Sci., 1992, 660, 306-309; Manoharan et al., Bioorg. Med. Chem. Let., 1993, 3, 2765-2770), a thiocholesterol (Oberhauser et al., Nucl. Acids Res., 1992, 20, 533-538), an aliphatic chain, e.g., do-decan-diol or undecyl residues (Saison-Behmoaras et al., EMBO J., 1991, 10, 1111-1118; Kabanov et al., FEBS Lett., 1990, 259, 327-330; Svinarchuk et al., Biochimie, 1993, 75, 49-54), a phospholipid, e.g., di-hexadecyl-rac-glycerol or triethyl-ammonium 1,2-di-O-hexadecyl-rac-glycero-3-H-phosphonate (Manoharan et al., Tetrahedron Lett., 1995, 36, 3651-3654; Shea et al., Nucl. Acids Res., 1990, 18, 3777-3783), a polyamine or a polyethylene glycol chain (Manoharan et al., Nucleosides & Nucleotides, 1995, 14, 969-973), or adamantane acetic acid (Manoharan et al., Tetrahedron Lett., 1995, 36, 3651-3654), a palmityl moiety (Mishra et al., Biochim. Biophys. Acta, 1995, 1264, 229-237), an octadecylamine or hexylamino-carbonyl-oxycholesterol moiety (Crooke et al., J. Pharmacol. Exp. Ther., 1996, 277, 923-937), a tocopherol group (Nishina et al., Molecular Therapy Nucleic Acids, 2015, 4, e220; doi:10.1038/mtna.2014.72 and Nishina et al., Molecular Therapy, 2008, 16, 734-740), or a GalNAc cluster (e.g., WO2014/179620).

[0313] In certain embodiments, a conjugate group comprises an active drug substance, for example, aspirin, warfarin, phenylbutazone, ibuprofen, suprofen, fen-bufen, ketoprofen, (S)-(+)-pranoprofen, carprofen, dansylsarcosine, 2,3,5-triiodobenzoic acid, fingolimod, flufenamic acid, folinic acid, a benzothiadiazide, chlorothiazide, a diazepine, indo-methicin, a barbiturate, a cephalosporin, a sulfa drug, an antidiabetic, an antibacterial or an antibiotic.

[0314] Conjugate groups are attached directly or via an optional conjugate linker to a parent compound, such as an oligonucleotide. In certain embodiments, conjugate groups are directly attached to oligonucleotides. In certain embodiments, conjugate groups are indirectly attached to oligonucleotides via conjugate linkers. In certain embodiments, the conjugate linker comprises a chain structure, such as a hydrocarbyl chain, or an oligomer of repeating units such as ethylene glycol or amino acid units. In certain embodiments, conjugate groups comprise a cleavable moiety. In certain embodiments, conjugate groups are attached to oligonucleotides via a cleavable moiety. In certain embodiments, conjugate linkers comprise a cleavable moiety. In certain such embodiments, conjugate linkers are attached to oligonucleotides via a cleavable moiety. In certain embodiments, oligonucleotides comprise a cleavable moiety, wherein the cleavable moiety is a nucleoside is attached to a cleavable internucleoside linkage, such as a phosphate internucleoside linkage. In certain embodiments, a conjugate group comprises a nucleoside or oligonucleotide, wherein the nucleoside or oligonucleotide of the conjugate group is indirectly attached to a parent oligonucleotide.

[0315] In certain embodiments, a conjugate linker comprises one or more groups selected from alkyl, amino, oxo, amide, disulfide, polyethylene glycol, ether, thioether, and hydroxylamino. In certain such embodiments, the conjugate linker comprises groups selected from alkyl, amino, oxo, amide and ether groups. In certain embodiments, the conjugate linker comprises groups selected from alkyl and amide groups. In certain embodiments, the conjugate linker comprises groups selected from alkyl and ether groups. In certain embodiments, the conjugate linker comprises at least one phosphorus moiety. In certain embodiments, the conjugate linker comprises at least one phosphate group. In certain embodiments, the conjugate linker includes at least one neutral linking group.

[0316] In certain embodiments, conjugate linkers, including the conjugate linkers described above, are bifunctional linking moieties, e.g., those known in the art to be useful for attaching conjugate groups to parent compounds, such as the oligonucleotides provided herein. In general, a bifunctional linking moiety comprises at least two functional groups. One of the functional groups is selected to bind to a particular site on a parent compound and the other is selected to bind to a conjugate group. Examples of functional groups used in a bifunctional linking moiety include but are not limited to electrophiles for reacting with nucleophilic groups and nucleophiles for reacting with electrophilic groups. In certain embodiments, bifunctional linking moieties comprise one or more groups selected from amino, hydroxyl, carboxylic acid, thiol, alkyl, alkenyl, and alkynyl.

[0317] Examples of conjugate linkers include but are not limited to pyrrolidine, 8-amino-3,6-dioxaoctanoic acid (ADO), succinimidyl 4-(N-maleimidomethyl) cyclohexane-1-carboxylate (SMCC) and 6-aminohexanoic acid (AHEX or AHA). Other conjugate linkers include but are not limited to substituted or unsubstituted C₁-C₁₀ alkyl, substituted or unsubstituted C₂-C₁₀ alkenyl or substituted or unsubstituted C₂-C₁₀ alkynyl, wherein a nonlimiting list of preferred substituent groups includes hydroxyl, amino, alkoxy, carboxy, benzyl, phenyl, nitro, thiol, thioalkoxy, halogen, alkyl, aryl, alkenyl and alkynyl.

[0318] In certain embodiments, a cleavable moiety is a cleavable bond. In certain embodiments, a cleavable moiety comprises a cleavable bond. In certain embodiments, a cleavable moiety is a group of atoms comprising at least one cleavable bond. In certain embodiments, a cleavable moiety comprises a group of atoms having one, two, three, four, or more than four cleavable bonds. In certain embodiments, a cleavable moiety is selectively cleaved inside a cell or subcellular compartment, such as a lysosome. In certain embodiments, a cleavable moiety is selectively cleaved by endogenous enzymes, such as nucleases.

[0319] In certain embodiments, a cleavable bond is selected from among: an amide, an ester, an ether, one or both esters of a phosphodiester, a phosphate ester, a carbamate, or a disulfide. In certain embodiments, a cleavable bond is one or both of the esters of a phosphodiester. In certain embodiments, a cleavable moiety comprises a phosphate or phosphodiester. In certain embodiments, the cleavable moiety is a phosphate linkage between an oligonucleotide and a conjugate linker or conjugate group.

[0320] In certain embodiments, a cleavable moiety is a nucleoside. In certain such embodiments, the unmodified or modified nucleoside comprises an optionally protected heterocyclic base selected from a purine, substituted purine, pyrimidine or substituted pyrimidine. In certain embodiments, a cleavable moiety is a nucleoside selected from uracil, thymine, cytosine, 4-N-benzoylcytosine, 5-methylcytosine, 4-N-benzoyl-5-methylcytosine, adenine, 6-N-benzoyladenine, guanine and 2-N-isobutyrylguanine. In certain embodiments, a cleavable moiety is 2′-deoxy nucleoside that is attached to either the 3′ or 5′-terminal nucleoside of an oligonucleotide by a phosphate internucleoside linkage and covalently attached to the conjugate linker or conjugate group by a phosphate or phosphorothioate linkage. In certain such embodiments, the cleavable moiety is 2′-deoxyadenosine.

[0321] Conjugate groups may be attached to either or both ends of an oligonucleotide and/or at any internal position. In certain embodiments, conjugate groups are attached to the 2′-position of a nucleoside of a modified oligonucleotide. In certain embodiments, conjugate groups that are attached to either or both ends of an oligonucleotide are terminal groups. In certain such embodiments, conjugate groups or terminal groups are attached at the 3′ and/or 5′-end of oligonucleotides. In certain such embodiments, conjugate groups (or terminal groups) are attached at the 3′-end of oligonucleotides. In certain embodiments, conjugate groups are attached near the 3′-end of oligonucleotides. In certain embodiments, conjugate groups (or terminal groups) are attached at the 5′-end of oligonucleotides. In certain embodiments, conjugate groups are attached near the 5′-end of oligonucleotides.

[0322] Examples of terminal groups include but are not limited to conjugate groups, capping groups, phosphate moieties, protecting groups, modified or unmodified nucleosides, and two or more nucleosides that are independently modified or unmodified.

[0323] In certain embodiments, a conjugate group is a cell-targeting moiety. In certain embodiments, a conjugate group, optional conjugate linker, and optional cleavable moiety have the general formula:

[chemical structure]

[0324] wherein n is from 1 to about 3, m is 0 when n is 1, m is 1 when n is 2 or greater, j is 1 or 0, and k is 1 or 0.

[0325] In certain embodiments, n is 1, j is 1 and k is 0. In certain embodiments, n is 1, j is 0 and k is 1. In certain embodiments, n is 1, j is 1 and k is 1. In certain embodiments, n is 2, j is 1 and k is 0. In certain embodiments, n is 2, j is 0 and k is 1. In certain embodiments, n is 2, j is 1 and k is 1. In certain embodiments, n is 3, j is 1 and k is 0. In certain embodiments, n is 3, j is 0 and k is 1. In certain embodiments, n is 3, j is 1 and k is 1.

[0326] In certain embodiments, conjugate groups comprise cell-targeting moieties that have at least one tethered ligand. In certain embodiments, cell-targeting moieties comprise two tethered ligands covalently attached to a branching group. In certain embodiments, cell-targeting moieties comprise three tethered ligands covalently attached to a branching group.

[0327] In certain embodiments, the cell-targeting moiety comprises a branching group comprising one or more groups selected from alkyl, amino, oxo, amide, disulfide, polyethylene glycol, ether, thioether and hydroxylamino groups. In certain embodiments, the branching group comprises a branched aliphatic group comprising groups selected from alkyl, amino, oxo, amide, disulfide, polyethylene glycol, ether, thioether and hydroxylamino groups. In certain such embodiments, the branched aliphatic group comprises groups selected from alkyl, amino, oxo, amide and ether groups. In certain such embodiments, the branched aliphatic group comprises groups selected from alkyl, amino and ether groups. In certain such embodiments, the branched aliphatic group comprises groups selected from alkyl and ether groups. In certain embodiments, the branching group comprises a mono or polycyclic ring system.

[0328] In certain embodiments, each tether of a cell-targeting moiety comprises one or more groups selected from alkyl, substituted alkyl, ether, thioether, disulfide, amino, oxo, amide, phosphodiester, and polyethylene glycol, in any combination. In certain embodiments, each tether is a linear aliphatic group comprising one or more groups selected from alkyl, ether, thioether, disulfide, amino, oxo, amide, and polyethylene glycol, in any combination. In certain embodiments, each tether is a linear aliphatic group comprising one or more groups selected from alkyl, phosphodiester, ether, amino, oxo, and amide, in any combination. In certain embodiments, each tether is a linear aliphatic group comprising one or more groups selected from alkyl, ether, amino, oxo, and amid, in any combination. In certain embodiments, each tether is a linear aliphatic group comprising one or more groups selected from alkyl, amino, and oxo, in any combination. In certain embodiments, each tether is a linear aliphatic group comprising one or more groups selected from alkyl and oxo, in any combination. In certain embodiments, each tether is a linear aliphatic group comprising one or more groups selected from alkyl and phosphodiester, in any combination. In certain embodiments, each tether comprises at least one phosphorus linking group or neutral linking group. In certain embodiments, each tether comprises a chain from about 6 to about 20 atoms in length. In certain embodiments, each tether comprises a chain from about 10 to about 18 atoms in length. In certain embodiments, each tether comprises about 10 atoms in chain length.

[0329] In certain embodiments, each ligand of a cell-targeting moiety has an affinity for at least one type of receptor on a target cell. In certain embodiments, each ligand has an affinity for at least one type of receptor on the surface of a mammalian liver cell. In certain embodiments, each ligand has an affinity for the hepatic asialoglycoprotein receptor (ASGP-R). In certain embodiments, each ligand is a carbohydrate. In certain embodiments, each ligand is, independently selected from galactose, N-acetyl galactoseamine (GalNAc), mannose, glucose, glucoseamine and fucose. In certain embodiments, each ligand is N-acetyl galactoseamine (GalNAc). In certain embodiments, the cell-targeting moiety comprises 3 GalNAc ligands. In certain embodiments, the cell-targeting moiety comprises 2 GalNAc ligands. In certain embodiments, the cell-targeting moiety comprises 1 GalNAc ligand.

[0330] In certain embodiments, each ligand of a cell-targeting moiety is a carbohydrate, carbohydrate derivative, modified carbohydrate, polysaccharide, modified polysaccharide, or polysaccharide derivative. In certain such embodiments, the conjugate group comprises a carbohydrate cluster (see, e.g., Maier et al., “Synthesis of Antisense Oligonucleotides Conjugated to a Multivalent Carbohydrate Cluster for Cellular Targeting,” Bioconjugate Chemistry, 2003, 14, 18-29, or Rensen et al., “Design and Synthesis of Novel N-Acetylgalactosamine-Terminated Glycolipids for Targeting of Lipoproteins to the Hepatic Asiaglycoprotein Receptor,” J. Med. Chem. 2004, 47, 5798-5808, which are incorporated herein by reference in their entirety). In certain such embodiments, each ligand is an amino sugar or a thio sugar. For example, amino sugars may be selected from any number of compounds known in the art, such as sialic acid, α-D-galactosamine, β-muramic acid, 2-deoxy-2-methylamino-L-glucopyranose, 4,6-dideoxy-4-formamido-2,3-di-O-methyl-D-mannopyranose, 2-deoxy-2-sulfoamino-D-glucopyranose and N-sulfo-D-glucosamine, and N-glycoloyl-α-neuraminic acid. For example, thio sugars may be selected from 5-Thio-β-D-glucopyranose, methyl 2,3,4-tri-O-acetyl-1-thio-6-O-trityl-α-D-glucopyranoside, 4-thio-β-D-galactopyranose, and ethyl 3,4,6,7-tetra-O-acetyl-2-deoxy-1,5-dithio-α-D-gluco-heptopyranoside.

[0331] In certain embodiments, conjugate groups comprise a cell-targeting moiety having the formula:

[chemical structure]

[0332] In certain embodiments, conjugate groups comprise a cell-targeting moiety having the formula:

[chemical structure]

[0333] In certain embodiments, conjugate groups comprise a cell-targeting moiety having the formula:

[chemical structure]

[0334] In certain embodiments, antisense compounds and oligomeric compounds comprise a conjugate group and conjugate linker described herein as “LICA-1”. LICA-1 has the formula:

[chemical structure]

[0335] In certain embodiments, antisense compounds and oligomeric compounds comprising LICA-1 have the formula:

[chemical structure]

[0336] wherein oligo is an oligonucleotide.

[0337] Representative publications that teach the preparation of certain of the above noted conjugate groups, oligomeric compounds and antisense compounds comprising conjugate groups, tethers, conjugate linkers, branching groups, ligands, cleavable moieties as well as other modifications include without limitation, U.S. Pat. No. 5,994,517, U.S. Pat. No. 6,300,319, U.S. Pat. No. 6,660,720, U.S. Pat. No. 6,906,182, U.S. Pat. No. 7,262,177, U.S. Pat. No. 7,491,805, U.S. Pat. No. 8,106,022, U.S. Pat. No. 7,723,509, US 2006/0148740, US 2011/0123520, WO 2013/033230 and WO 2012/037254, Biessen et al., J. Med. Chem. 1995, 38, 1846-1852, Lee et al., Bioorganic & Medicinal Chemistry 2011, 19, 2494-2500, Rensen et al., J. Biol. Chem. 2001, 276, 37577-37584, Rensen et al., J. Med. Chem. 2004, 47, 5798-5808, Sliedregt et al., J. Med. Chem. 1999, 42, 609-618, and Valentijn et al., Tetrahedron, 1997, 53, 759-770, each of which is incorporated by reference herein in its entirety.

[0338] In certain embodiments, antisense compounds and oligomeric compounds comprise modified oligonucleotides comprising a gapmer or fully modified motif and a conjugate group comprising at least one, two, or three GalNAc ligands. In certain embodiments antisense compounds and oligomeric compounds comprise a conjugate group found in any of the following references: Lee, Carbohydr Res, 1978, 67, 509-514; Connolly et al., J Biol Chem, 1982, 257, 939-945; Pavia et al., Int J Pep Protein Res, 1983, 22, 539-548; Lee et al., Biochem, 1984, 23, 4255-4261; Lee et al., Glycoconjugate J, 1987, 4, 317-328; Toyokuni et al., Tetrahedron Lett, 1990, 31, 2673-2676; Biessen et al., J Med Chem, 1995, 38, 1538-1546; Valentijn et al., Tetrahedron, 1997, 53, 759-770; Kim et al., Tetrahedron Lett, 1997, 38, 3487-3490; Lee et al., Bioconjug Chem, 1997, 8, 762-765; Kato et al., Glycobiol, 2001, 11, 821-829; Rensen et al., J Biol Chem, 2001, 276, 37577-37584; Lee et al., Methods Enzymol, 2003, 362, 38-43; Westerlind et al., Glycoconj J, 2004, 21, 227-241; Lee et al., Bioorg Med Chem Lett, 2006, 16(19), 5132-5135; Maierhofer et al., Bioorg Med Chem, 2007, 15, 7661-7676; Khorev et al., Bioorg Med Chem, 2008, 16, 5216-5231; Lee et al., Bioorg Med Chem, 2011, 19, 2494-2500; Kornilova et al., Analyt Biochem, 2012, 425, 43-46; Pujol et al., Angew Chemie Int Ed Engl, 2012, 51, 7445-7448; Biessen et al., J Med Chem, 1995, 38, 1846-1852; Sliedregt et al., J Med Chem, 1999, 42, 609-618; Rensen et al., J Med Chem, 2004, 47, 5798-5808; Rensen et al., Arterioscler Thromb Vasc Biol, 2006, 26, 169-175; van Rossenberg et al., Gene Ther, 2004, 11, 457-464; Sato et al., J Am Chem Soc, 2004, 126, 14013-14022; Lee et al., J Org Chem, 2012, 77, 7564-7571; Biessen et al., FASEB J, 2000, 14, 1784-1792; Rajur et al., Bioconjug Chem, 1997, 8, 935-940; Duff et al., Methods Enzymol, 2000, 313, 297-321; Maier et al., Bioconjug Chem, 2003, 14, 18-29; Jayaprakash et al., Org Lett, 2010, 12, 5410-5413; Manoharan, Antisense Nucleic Acid Drug Dev, 2002, 12, 103-128; Merwin et al., Bioconjug Chem, 1994, 5, 612-620; Tomiya et al., Bioorg Med Chem, 2013, 21, 5275-5281; International applications WO1998/013381; WO2011/038356; WO1997/046098; WO2008/098788; WO2004/101619; WO2012/037254; WO2011/120053; WO2011/100131; WO2011/163121; WO2012/177947; WO2013/033230; WO2013/075035; WO2012/083185; WO2012/083046; WO2009/082607; WO2009/134487; WO2010/144740; WO2010/148013; WO1997/020563; WO2010/088537; WO2002/043771; WO2010/129709; WO2012/068187; WO2009/126933; WO2004/024757; WO2010/054406; WO2012/089352; WO2012/089602; WO2013/166121; WO2013/165816; U.S. Pat. Nos. 4,751,219; 8,552,163; 6,908,903; 7,262,177; 5,994,517; 6,300,319; 8,106,022; 7,491,805; 7,491,805; 7,582,744; 8,137,695; 6,383,812; 6,525,031; 6,660,720; 7,723,509; 8,541,548; 8,344,125; 8,313,772; 8,349,308; 8,450,467; 8,501,930; 8,158,601; 7,262,177; 6,906,182; 6,620,916; 8,435,491; 8,404,862; 7,851,615; Published U.S. Patent Application Publications 052011/0097264; 052011/0097265; 052013/0004427; 052005/0164235; 052006/0148740; 052008/0281044; 052010/0240730; 052003/0119724; 052006/0183886; 052008/0206869; 052011/0269814; 052009/0286973; 052011/0207799; 052012/0136042; 052012/0165393; 052008/0281041; 052009/0203135; 052012/0035115; 052012/0095075; 052012/0101148; 052012/0128760; 052012/0157509; 052012/0230938; 052013/0109817; 052013/0121954; 052013/0178512; 052013/0236968; 052011/0123520; 052003/0077829; 052008/0108801; and U52009/0203132; each of which is incorporated by reference in its entirety.

### Compositions and Methods for Formulating Pharmaceutical Compositions

[0339] Compounds may be admixed with pharmaceutically acceptable active or inert substances for the preparation of pharmaceutical compositions or formulations. Compositions and methods for the formulation of pharmaceutical compositions are dependent upon a number of criteria, including, but not limited to, route of administration, extent of disease, or dose to be administered.

[0340] In certain embodiments, the present invention provides pharmaceutical compositions comprising one or more compounds or a salt thereof. In certain such embodiments, the pharmaceutical composition comprises a suitable pharmaceutically acceptable diluent or carrier. In certain embodiments, a pharmaceutical composition comprises a sterile saline solution and one or more compounds. In certain embodiments, such pharmaceutical composition consists of a sterile saline solution and one or more compounds. In certain embodiments, the sterile saline is pharmaceutical grade saline. In certain embodiments, a pharmaceutical composition comprises one or more antisense compound and sterile water. In certain embodiments, a pharmaceutical composition consists of one compounds and sterile water. In certain embodiments, the sterile water is pharmaceutical grade water. In certain embodiments, a pharmaceutical composition comprises one or more compounds and phosphate-buffered saline (PBS). In certain embodiments, a pharmaceutical composition consists of one or more compounds and sterile PBS. In certain embodiments, the sterile PBS is pharmaceutical grade PBS. Compositions and methods for the formulation of pharmaceutical compositions are dependent upon a number of criteria, including, but not limited to, route of administration, extent of disease, or dose to be administered.

[0341] A compound targeted to KRAS nucleic acid can be utilized in pharmaceutical compositions by combining the compound with a suitable pharmaceutically acceptable diluent or carrier. In certain embodiments, a pharmaceutically acceptable diluent is water, such as sterile water suitable for injection. Accordingly, in one embodiment, employed in the methods described herein is a pharmaceutical composition comprising a compound targeted to KRAS nucleic acid and a pharmaceutically acceptable diluent. In certain embodiments, the pharmaceutically acceptable diluent is water. In certain embodiments, the compound is an antisense oligonucleotide provided herein.

[0342] Pharmaceutical compositions comprising compounds encompass any pharmaceutically acceptable salts, esters, or salts of such esters, or any other oligonucleotide which, upon administration to an animal, including a human, is capable of providing (directly or indirectly) the biologically active metabolite or residue thereof. Accordingly, for example, the disclosure is also drawn to pharmaceutically acceptable salts of compounds, prodrugs, pharmaceutically acceptable salts of such prodrugs, and other bioequivalents. Suitable pharmaceutically acceptable salts include, but are not limited to, sodium and potassium salts.

[0343] A prodrug can include the incorporation of additional nucleosides at one or both ends of a compound which are cleaved by endogenous nucleases within the body, to form the active compound. In certain embodiments, the compounds or compositions further comprise a pharmaceutically acceptable carrier or diluent.

### EXAMPLES

[0344] The Examples below describe the screening process to identify lead compounds targeted to KRAS. Approximately 2,000 newly designed compounds were tested for their effect on human KRAS mRNA. New compounds were compared with a previously described compound, ISIS 6957, which was reported as one of the most potent antisense compounds in U.S. Pat. No. 6,784,290. Out of over 2,000 antisense oligonucleotides that were screened, ISIS #651530, 651987, 695785, 695823, 651555, 651587, 695980, 695995, 696018, 696044, 716600, 746275, 716655, 716772, 740179, 740191, 740201, 740223, and 740233 emerged as the top lead compounds.

### Non-Limiting Disclosure and Incorporation by Reference

[0345] Although the sequence listing accompanying this filing identifies each sequence as either “RNA” or “DNA” as required, in reality, those sequences may be modified with any combination of chemical modifications. One of skill in the art will readily appreciate that such designation as “RNA” or “DNA” to describe modified oligonucleotides is, in certain instances, arbitrary. For example, an oligonucleotide comprising a nucleoside comprising a 2′-OH sugar moiety and a thymine base could be described as a DNA having a modified sugar (2′-OH for the natural 2′-H of DNA) or as an RNA having a modified base (thymine (methylated uracil) for natural uracil of RNA).

[0346] Accordingly, nucleic acid sequences provided herein, including, but not limited to those in the sequence listing, are intended to encompass nucleic acids containing any combination of natural or modified RNA and/or DNA, including, but not limited to such nucleic acids having modified nucleobases. By way of further example and without limitation, an oligonucleotide having the nucleobase sequence “ATCGATCG” encompasses any oligonucleotides having such nucleobase sequence, whether modified or unmodified, including, but not limited to, such compounds comprising RNA bases, such as those having sequence “AUCGAUCG” and those having some DNA bases and some RNA bases such as “AUCGATCG”.

[0347] While certain compounds, compositions and methods described herein have been described with specificity in accordance with certain embodiments, the following examples serve only to illustrate the compounds described herein and are not intended to limit the same. Each of the references recited in the present application is incorporated herein by reference in its entirety.

### Example 1: Antisense Inhibition of Human K-Ras in SKOV3 Cells by cEt Gapmers

[0348] Antisense oligonucleotides were designed targeting a K-Ras nucleic acid and were tested for their effects on K-Ras mRNA in vitro. The antisense oligonucleotides were tested in a series of experiments that had similar culture conditions. The results for each experiment are presented in separate tables shown below. Cultured SKOV3 cells at a density of 20,000 cells per well were transfected using electroporation with 2,500 nM antisense oligonucleotide. After a treatment period of approximately 24 hours, RNA was isolated from the cells and K-Ras mRNA levels were measured by quantitative real-time PCR. Human primer probe set RTS246 (forward sequence CCCAGGTGCGGGAGAGA, designated herein as SEQ ID NO: 4; reverse sequence GCTGTATCGTCAAGGCACTCTTG; designated herein as SEQ ID NO: 5; probe sequence CTTGTGGTAGTTGGAGCTGGTGGCGTAG, designated herein as SEQ ID NO: 6) was used to measure mRNA levels. K-Ras mRNA levels were adjusted according to total RNA content, as measured by RIBOGREEN®. Results are presented as percent inhibition of K-Ras, relative to untreated control cells. As used herein, a value of ‘0’ indicates that treatment with the antisense oligonucleotide did not inhibit mRNA levels.

[0349] The newly designed chimeric antisense oligonucleotides in the Tables below were designed as 3-10-3 cEt gapmers. The gapmers are 16 nucleosides in length, wherein the central gap segment comprises of ten 2′-deoxynucleosides and is flanked by wing segments on the 5′ direction and the 3′ direction comprising three nucleosides each. Each nucleoside in the 5′ wing segment and each nucleoside in the 3′ wing segment has a cEt sugar modification. The internucleoside linkages throughout each gapmer are phosphorothioate (P═S) linkages. All cytosine residues throughout each gapmer are 5-methylcytosines. “Start site” indicates the 5′-most nucleoside to which the gapmer is targeted in the human gene sequence. “Stop site” indicates the 3′-most nucleoside to which the gapmer is targeted human gene sequence. Each gapmer listed in the Tables below is targeted to either a human K-Ras mRNA, designated herein as SEQ ID NO: 1 (GENBANK Accession No. NM_004985.4), the human K-Ras genomic sequence, designated herein as SEQ ID NO: 2 (the complement of GENBANK Accession No. NT_009714.17 truncated from nucleotides 18116000 to Ser. No. 18/166,000), or a human K-Ras mRNA sequence, designated herein as SEQ ID NO: 3 (GENBANK Accession No. NM_033360.3). ‘N/A’ indicates that the antisense oligonucleotide does not target that particular gene sequence with 100% complementarity.

TABLE 1
Inhibition of K-Ras mRNA by 3-10-3 cEt gapmers targeting SEQ ID NO: 1, 2,
and 3

| | SEQ ID | SEQ ID | SEQ ID | SEQ ID | SEQ ID | SEQ ID | | | |
|---|---|---|---|---|---|---|---|---|---|
| | NO: 1 | NO: 1 | NO: 2 | NO: 2 | NO: 3 | NO: 3 | | | SEQ |
| ISIS | Start | Stop | Start | Stop | Start | Stop | | % | ID |
| NO | Site | Site | Site | Site | Site | Site | Sequence | Inhibition | NO |
| 540729 | N/A | N/A | N/A | N/A | 754 | 769 | ACCCAGATTACATTAT | 0 | 13 |
| 540731 | 669 | 684 | 43058 | 43073 | 793 | 808 | TCGAATTTCTCGAACT | 41 | 14 |
| 540733 | 830 | 845 | 43219 | 43234 | 954 | 969 | GCTAAAACAAATGCTA | 54 | 15 |
| 540741 | 346 | 361 | 25573 | 25588 | 346 | 361 | CGAGAATATCCAAGAG | 48 | 16 |
| 540743 | 356 | 371 | 25583 | 25598 | 356 | 371 | CCTGCTGTGTCGAGAA | 66 | 17 |
| 540745 | 358 | 373 | 25585 | 25600 | 358 | 373 | GACCTGCTGTGTCGAG | 52 | 18 |
| 540747 | 466 | 481 | 25693 | 25708 | 466 | 481 | TATAATGGTGAATATC | 37 | 19 |
| 540749 | 476 | 491 | N/A | N/A | 476 | 491 | ATTTGTTCTCTATAAT | 21 | 20 |
| 540751 | 586 | 601 | 27273 | 27288 | 586 | 601 | AACTTCTTGCTAAGTC | 43 | 21 |
| 540753 | 658 | 673 | 43047 | 43062 | 782 | 797 | GAACTAATGTATAGAA | 44 | 22 |
| 540755 | 789 | 804 | 43178 | 43193 | 913 | 928 | TACCACTTGTACTAGT | 74 | 23 |
| 540757 | 868 | 883 | 43257 | 43272 | 992 | 1007 | CTAACAGTCTGCATGG | 63 | 24 |
| 540759 | 934 | 949 | 43323 | 43338 | 1058 | 1073 | AATACTGGCACTTAGA | 42 | 25 |
| 540761 | 1072 | 1087 | 43461 | 43476 | 1196 | 1211 | TGTTTCACACCAACAT | 61 | 26 |
| 540763 | 1228 | 1243 | 43617 | 43632 | 1352 | 1367 | TGCCTAGAAGAATCAT | 58 | 27 |
| 540765 | 1291 | 1306 | 43680 | 43695 | 1415 | 1430 | GACAAAACCTTTGTGA | 54 | 28 |
| 540767 | 1316 | 1331 | 43705 | 43720 | 1440 | 1455 | CCATGACTAATAGCAG | 88 | 29 |
| 540769 | 1473 | 1488 | 43862 | 43877 | 1597 | 1612 | ATACTGGGTCTGCCTT | 79 | 30 |
| 540771 | 1507 | 1522 | 43896 | 43911 | 1631 | 1646 | GCCCCAAAATGGTTGC | 55 | 31 |
| 540773 | 1526 | 1541 | 43915 | 43930 | 1650 | 1665 | TTAGTAGCATGTAAAT | 46 | 32 |
| 540775 | 1637 | 1652 | 44026 | 44041 | 1761 | 1776 | GAAAAGATTTAAAGTT | 0 | 33 |
| 540777 | 1709 | 1724 | 44098 | 44113 | 1833 | 1848 | GCTATAACTGGCCCAA | 83 | 34 |
| 540779 | 1898 | 1913 | 44287 | 44302 | 2022 | 2037 | ACCACAGAGTGAGATT | 79 | 35 |
| 540781 | 2102 | 2117 | 44491 | 44506 | 2226 | 2241 | GTTAATTTAACCAGTG | 80 | 36 |
| 540783 | 2223 | 2238 | 44612 | 44627 | 2347 | 2362 | TGCCATCTCACTTCAT | 57 | 37 |
| 540785 | 2318 | 2333 | 44707 | 44722 | 2442 | 2457 | TAGTAAGTGATGTCCT | 73 | 38 |
| 540787 | 2460 | 2475 | 44849 | 44864 | 2584 | 2599 | GTGTAACATAGGTTAA | 75 | 39 |
| 540789 | 2490 | 2505 | 44879 | 44894 | 2614 | 2629 | CAATTTTGCCCAAGAC | 42 | 40 |
| 540791 | 2542 | 2557 | 44931 | 44946 | 2666 | 2681 | GAAGAGTCCTAAAACG | 50 | 41 |
| 540793 | 2571 | 2586 | 44960 | 44975 | 2695 | 2710 | TAGGGAGGCAAGATGA | 56 | 42 |
| 540795 | 2599 | 2614 | 44988 | 45003 | 2723 | 2738 | TGCATCAAGTCATGGG | 83 | 43 |
| 540797 | 2694 | 2709 | 45083 | 45098 | 2818 | 2833 | TAGGGCATTTCTGATG | 38 | 44 |
| 540799 | 2794 | 2809 | 45183 | 45198 | 2918 | 2933 | GAGATGTTCAAAGCAT | 49 | 45 |
| 540801 | 2818 | 2833 | 45207 | 45222 | 2942 | 2957 | GTCGCTAATGGATTGG | 92 | 46 |
| 540803 | 2879 | 2894 | 45268 | 45283 | 3003 | 3018 | TAAATTCTCCTTCCAC | 49 | 47 |
| 540805 | 2957 | 2972 | 45346 | 45361 | 3081 | 3096 | ACAATGGAATGTATTA | 40 | 48 |
| 540807 | 3335 | 3350 | 45777 | 45792 | 3459 | 3474 | CGGTGACTGGCATCTG | 76 | 49 |
| 540809 | 3388 | 3403 | N/A | N/A | 3512 | 3527 | AGGACCGGGATTATGT | 70 | 50 |
| 540811 | 3428 | 3443 | 45817 | 45832 | 3552 | 3567 | GGCCTTAGTAAGATAT | 28 | 51 |
| 540813 | 3673 | 3688 | 46062 | 46077 | 3797 | 3812 | TGAATATCTGACATAC | 60 | 52 |
| 540815 | 3780 | 3795 | 46169 | 46184 | 3904 | 3919 | CTAGTTCAGGCACCTG | 65 | 53 |
| 540817 | 3871 | 3886 | 46260 | 46275 | 3995 | 4010 | CCTACCTAAACAGTGT | 21 | 54 |
| 540819 | 3896 | 3911 | 46285 | 46300 | 4020 | 4035 | CGAGGTACTGTGTAAG | 82 | 55 |
| 540821 | 3926 | 3941 | 46315 | 46330 | 4050 | 4065 | AGTATGGCCATTTCTT | 74 | 56 |
| 540823 | 3954 | 3969 | 46343 | 46358 | 4078 | 4093 | ATCCCCTCATAAGCAC | 61 | 57 |
| 540825 | 4107 | 4122 | 46496 | 46511 | 4231 | 4246 | AATAATTAGGTAACAT | 17 | 58 |
| 540827 | 4205 | 4220 | 46594 | 46609 | 4329 | 4344 | GTCTGCTATATTCTTC | 69 | 59 |
| 540829 | 4240 | 4255 | 46629 | 46644 | 4364 | 4379 | TACTTGGGAACATTCA | 63 | 60 |
| 540831 | 4276 | 4291 | 46665 | 46680 | 4400 | 4415 | TGCAGTGTGACTCAGT | 76 | 61 |
| 540833 | 4278 | 4293 | 46667 | 46682 | 4402 | 4417 | TATGCAGTGTGACTCA | 78 | 62 |
| 540835 | 4284 | 4299 | 46673 | 46688 | 4408 | 4423 | AATTCCTATGCAGTGT | 67 | 63 |
| 540839 | 4343 | 4358 | 46732 | 46747 | 4467 | 4482 | TAGGACAAAATTGTGC | 75 | 64 |
| 540842 | 4365 | 4380 | 46754 | 46769 | 4489 | 4504 | CACAAAGTTTCTATGT | 29 | 65 |
| 540844 | 4531 | 4546 | 46920 | 46935 | 4655 | 4670 | ATCATTACTTTTTGAC | 17 | 66 |
| 540846 | 4579 | 4594 | 46968 | 46983 | 4703 | 4718 | AAGGTAACTGCTGGGT | 86 | 67 |
| 540848 | 4642 | 4657 | 47031 | 47046 | 4766 | 4781 | CTCAATGCAGAATTCA | 75 | 68 |
| 540850 | 4872 | 4887 | 47261 | 47276 | 4996 | 5011 | ACCCAGTTAGCTCTGT | 51 | 69 |
| 540852 | 4910 | 4925 | 47299 | 47314 | 5034 | 5049 | AGACAGTGGAATTGGA | 63 | 70 |
| 540854 | 4964 | 4979 | 47353 | 47368 | 5088 | 5103 | AAGAAATTGGCACTCA | 64 | 71 |
| 540856 | 4966 | 4981 | 47355 | 47370 | 5090 | 5105 | GTAAGAAATTGGCACT | 66 | 72 |
| 540858 | 4998 | 5013 | 47387 | 47402 | 5122 | 5137 | AGGTAAACATGTTACA | 72 | 73 |
| 540860 | 5089 | 5104 | 47478 | 47493 | 5213 | 5228 | TCACACTGCATATGTC | 57 | 74 |
| 540862 | 5091 | 5106 | 47480 | 47495 | 5215 | 5230 | GATCACACTGCATATG | 31 | 75 |
| 540868 | N/A | N/A | 17921 | 17936 | N/A | N/A | GCCCTTACTTATATGC | 13 | 76 |
| 540870 | N/A | N/A | 20681 | 20696 | N/A | N/A | ATCTTGCCCACTGTTT | 15 | 77 |
| 540872 | N/A | N/A | 25497 | 25512 | N/A | N/A | AGTCTGGATTATTACA | 19 | 78 |
| 540874 | N/A | N/A | 25507 | 25522 | N/A | N/A | GGAGAAACACAGTCTG | 16 | 79 |
| 540876 | N/A | N/A | 25700 | 25715 | N/A | N/A | ACCCACCTATAATGGT | 13 | 80 |
| 540878 | N/A | N/A | 34485 | 34500 | N/A | N/A | GAAGCCAATAATTAAA | 27 | 81 |
| 540880 | N/A | N/A | 34495 | 34510 | N/A | N/A | GAGAGAATTGGAAGCC | 74 | 82 |
| 540882 | N/A | N/A | 35991 | 36006 | N/A | N/A | TTAAAGCTGGTATATT | 34 | 83 |
| 540884 | N/A | N/A | 37456 | 37471 | 716 | 731 | CAGCCAGGAGTCTTTT | 26 | 84 |
| 540886 | N/A | N/A | 43024 | 43039 | N/A | N/A | TCAACACCCTGAAATA | 16 | 85 |

TABLE 2
Inhibition of K-Ras mRNA by 3-10-3 cEt gapmers targeting SEQ ID NO: 1, 2,
and 3

| | SEQ ID | SEQ ID | SEQ ID | SEQ ID | SEQ ID | SEQ ID | | | |
|---|---|---|---|---|---|---|---|---|---|
| | NO: 1 | NO: 1 | NO: 2 | NO: 2 | NO: 3 | NO: 3 | | | SEQ |
| ISIS | Start | Stop | Start | Stop | Start | Stop | | % | ID |
| NO | Site | Site | Site | Site | Site | Site | Sequence | Inhibition | NO |
| 540728 | N/A | N/A | 37402 | 37417 | 662 | 677 | TCCCTCACCAATGTAT | 0 | 86 |
| 540730 | N/A | N/A | N/A | N/A | 759 | 774 | TCAACACCCAGATTAC | 7 | 87 |
| 540732 | 673 | 688 | 43062 | 43077 | 797 | 812 | GTTTTCGAATTTCTCG | 65 | 88 |
| 540734 | 1924 | 1939 | 44313 | 44328 | 2048 | 2063 | AATGCTCTTGATTTGT | 74 | 89 |
| 540742 | 351 | 366 | 25578 | 25593 | 351 | 366 | TGTGTCGAGAATATCC | 76 | 90 |
| 540744 | 357 | 372 | 25584 | 25599 | 357 | 372 | ACCTGCTGTGTCGAGA | 65 | 91 |
| 540746 | 359 | 374 | 25586 | 25601 | 359 | 374 | TGACCTGCTGTGTCGA | 18 | 92 |
| 540748 | 471 | 486 | N/A | N/A | 471 | 486 | TTCTCTATAATGGTGA | 55 | 93 |
| 540750 | 495 | 510 | 27182 | 27197 | 495 | 510 | AGAGTCCTTAACTCTT | 24 | 94 |
| 540752 | 601 | 616 | 27288 | 27303 | 601 | 616 | TAAAAGGAATTCCATA | 19 | 95 |
| 540754 | 777 | 792 | 43166 | 43181 | 901 | 916 | TAGTATGCCTTAAGAA | 55 | 96 |
| 540756 | 810 | 825 | 43199 | 43214 | 934 | 949 | TTTAGTGTAATGTACA | 72 | 97 |
| 540758 | 933 | 948 | 43322 | 43337 | 1057 | 1072 | ATACTGGCACTTAGAG | 40 | 98 |
| 540760 | 996 | 1011 | 43385 | 43400 | 1120 | 1135 | AAATCTTAGGTATTCA | 47 | 99 |
| 540762 | 1096 | 1111 | 43485 | 43500 | 1220 | 1235 | GATGATTCAAAAGCTT | 78 | 100 |
| 540764 | 1240 | 1255 | 43629 | 43644 | 1364 | 1379 | TATAGGACATGATGCC | 67 | 101 |
| 540766 | 1304 | 1319 | 43693 | 43708 | 1428 | 1443 | GCAGTGGAAAGGAGAC | 85 | 102 |
| 540768 | 1462 | 1477 | 43851 | 43866 | 1586 | 1601 | GCCTTAACAGGAAAAG | 58 | 103 |
| 540770 | 1488 | 1503 | 43877 | 43892 | 1612 | 1627 | AATAATCCCCATTTCA | 24 | 104 |
| 540772 | 1520 | 1535 | 43909 | 43924 | 1644 | 1659 | GCATGTAAATATAGCC | 61 | 105 |
| 540774 | 1606 | 1621 | 43995 | 44010 | 1730 | 1745 | AGTCTGACACAGGGAG | 87 | 106 |
| 540776 | 1680 | 1695 | 44069 | 44084 | 1804 | 1819 | GTCACAAGCAGAATTA | 70 | 107 |
| 540778 | 1841 | 1856 | 44230 | 44245 | 1965 | 1980 | TTTTGACTAACCAATG | 33 | 108 |
| 540780 | 1910 | 1925 | 44299 | 44314 | 2034 | 2049 | GTCAGCAGGACCACCA | 79 | 109 |
| 540782 | 2132 | 2147 | 44521 | 44536 | 2256 | 2271 | TGGATCAGACTTGAAA | 80 | 110 |
| 540784 | 2263 | 2278 | 44652 | 44667 | 2387 | 2402 | GTCACCTTCTTCCTAG | 61 | 111 |
| 540786 | 2441 | 2456 | 44830 | 44845 | 2565 | 2580 | TTTACAGATTGTGCTG | 60 | 112 |
| 540788 | 2485 | 2500 | 44874 | 44889 | 2609 | 2624 | TTGCCCAAGACTGGCA | 0 | 113 |
| 540790 | 2502 | 2517 | 44891 | 44906 | 2626 | 2641 | TCACCTCTTGCACAAT | 60 | 114 |
| 540792 | 2556 | 2571 | 44945 | 44960 | 2680 | 2695 | ACACTAATATGGAAGA | 55 | 115 |
| 540794 | 2583 | 2598 | 44972 | 44987 | 2707 | 2722 | GCATGTGGAAGGTAGG | 73 | 116 |
| 540796 | 2681 | 2696 | 45070 | 45085 | 2805 | 2820 | ATGTGACTCAGTGGGA | 83 | 117 |
| 540798 | 2738 | 2753 | 45127 | 45142 | 2862 | 2877 | TATGGTATCTGTCAGA | 80 | 118 |
| 540800 | 2806 | 2821 | 45195 | 45210 | 2930 | 2945 | TTGGGCAGCAAAGAGA | 39 | 119 |
| 540802 | 2848 | 2863 | 45237 | 45252 | 2972 | 2987 | CTATTCATACCAGGTT | 74 | 120 |
| 540804 | 2944 | 2959 | 45333 | 45348 | 3068 | 3083 | TTACTGTTACCAGGAG | 81 | 121 |
| 540806 | 2981 | 2996 | 45370 | 45385 | 3105 | 3120 | GCATGAAGATTTCTGG | 91 | 122 |
| 540808 | 3376 | 3391 | 45765 | 45780 | 3500 | 3515 | ATGTCTCTTGTTTGGG | 83 | 123 |
| 540810 | 3416 | 3431 | 45805 | 45820 | 3540 | 3555 | ATATTACAGACCACAC | 52 | 124 |
| 540812 | 3627 | 3642 | 46016 | 46031 | 3751 | 3766 | GAATCACAGTTATGCC | 78 | 125 |
| 540814 | 3688 | 3703 | 46077 | 46092 | 3812 | 3827 | ACATTTGGGTCAATAT | 46 | 126 |
| 540816 | 3834 | 3849 | 46223 | 46238 | 3958 | 3973 | ATAGCAATTCAGAAAT | 18 | 127 |
| 540818 | 3883 | 3898 | 46272 | 46287 | 4007 | 4022 | AAGTCTTAACACCCTA | 68 | 128 |
| 540820 | 3908 | 3923 | 46297 | 46312 | 4032 | 4047 | TCTGTGTAGAAACGAG | 76 | 129 |
| 540822 | 3942 | 3957 | 46331 | 46346 | 4066 | 4081 | GCACTGCAGTTCCTGA | 82 | 130 |
| 540824 | 4013 | 4028 | 46402 | 46417 | 4137 | 4152 | TAATTAACCACTACCT | 6 | 131 |
| 540826 | 4167 | 4182 | 46556 | 46571 | 4291 | 4306 | TCTATGTAATTTAGCT | 65 | 132 |
| 540828 | 4220 | 4235 | 46609 | 46624 | 4344 | 4359 | AATGATACAATATACG | 33 | 133 |
| 540830 | 4261 | 4276 | 46650 | 46665 | 4385 | 4400 | TTAAATAGAGCCTAGA | 28 | 134 |
| 540832 | 4277 | 4292 | 46666 | 46681 | 4401 | 4416 | ATGCAGTGTGACTCAG | 79 | 135 |
| 540834 | 4279 | 4294 | 46668 | 46683 | 4403 | 4418 | CTATGCAGTGTGACTC | 73 | 136 |
| 540836 | 4338 | 4353 | 46727 | 46742 | 4462 | 4477 | CAAAATTGTGCAATGG | 74 | 137 |
| 540840 | 4351 | 4366 | 46740 | 46755 | 4475 | 4490 | GTATATATTAGGACAA | 37 | 138 |
| 540843 | 4455 | 4470 | 46844 | 46859 | 4579 | 4594 | TACTGTTTGAAGAAAA | 9 | 139 |
| 540845 | 4546 | 4561 | 46935 | 46950 | 4670 | 4685 | CACAATTATCAAGAAA | 18 | 140 |
| 540847 | 4641 | 4656 | 47030 | 47045 | 4765 | 4780 | TCAATGCAGAATTCAT | 67 | 141 |
| 540849 | 4655 | 4670 | 47044 | 47059 | 4779 | 4794 | AGCTATTCAGTTTCTC | 30 | 142 |
| 540851 | 4887 | 4902 | 47276 | 47291 | 5011 | 5026 | GGATAAAACACTGTAA | 58 | 143 |
| 540853 | 4956 | 4971 | 47345 | 47360 | 5080 | 5095 | GGCACTCAAAGGAAAA | 60 | 144 |
| 540855 | 4965 | 4980 | 47354 | 47369 | 5089 | 5104 | TAAGAAATTGGCACTC | 48 | 145 |
| 540857 | 4993 | 5008 | 47382 | 47397 | 5117 | 5132 | AACATGTTACATTAAG | 43 | 146 |
| 540859 | 5006 | 5021 | 47395 | 47410 | 5130 | 5145 | TACATTCCAGGTAAAC | 51 | 147 |
| 540861 | 5090 | 5105 | 47479 | 47494 | 5214 | 5229 | ATCACACTGCATATGT | 50 | 148 |
| 540863 | 5132 | 5147 | 47521 | 47536 | 5256 | 5271 | ACATTCCTAGGTCAGC | 76 | 149 |
| 540867 | N/A | N/A | 9205 | 9220 | N/A | N/A | AAACTTCCTTTTACAT | 19 | 150 |
| 540869 | N/A | N/A | 17927 | 17942 | N/A | N/A | TACTGAGCCCTTACTT | 15 | 151 |
| 540871 | N/A | N/A | 25492 | 25507 | N/A | N/A | GGATTATTACAGTGCA | 16 | 152 |
| 540873 | N/A | N/A | 25502 | 25517 | N/A | N/A | AACACAGTCTGGATTA | 6 | 153 |
| 540875 | N/A | N/A | 25695 | 25710 | N/A | N/A | CCTATAATGGTGAATA | 32 | 154 |
| 540877 | N/A | N/A | 32700 | 32715 | N/A | N/A | GATAAATGTGAACTAG | 33 | 155 |
| 540879 | N/A | N/A | 34490 | 34505 | N/A | N/A | AATTGGAAGCCAATAA | 29 | 156 |
| 540881 | N/A | N/A | 34511 | 34526 | N/A | N/A | TGTTTCCAGCAATGCA | 59 | 157 |
| 540883 | N/A | N/A | 37365 | 37380 | N/A | N/A | GCATTGTAAAACACAA | 16 | 158 |
| 540885 | N/A | N/A | 37494 | 37509 | N/A | N/A | TACCAGATTACATTAT | 0 | 159 |

### Example 2: Antisense Inhibition of Human K-Ras in Hep3B Cells by cEt Gapmers

[0350] Antisense oligonucleotides were designed targeting a K-Ras nucleic acid and were tested for their effects on K-Ras mRNA in vitro. The antisense oligonucleotides were tested in a series of experiments that had similar culture conditions. The results for each experiment are presented in separate tables shown below. Cultured Hep3B cells at a density of 20,000 cells per well were transfected using electroporation with 2,000 nM antisense oligonucleotide. After a treatment period of approximately 24 hours, RNA was isolated from the cells and K-Ras mRNA levels were measured by quantitative real-time PCR. Human primer probe set RTS3496_MGB (forward sequence GACACAAAACAGGCTCAGGACTT, designated herein as SEQ ID NO: 7; reverse sequence TCTTGTCTTTGCTGATGTTTCAATAA, designated herein as SEQ ID NO: 8; probe sequence AAGAAGTTATGGAATTCC, designated herein as SEQ ID NO: 9) was used to measure mRNA levels. K-Ras mRNA levels were adjusted according to total RNA content, as measured by RIBOGREEN®. Results are presented as percent inhibition of K-Ras, relative to untreated control cells. As used herein, a value of ‘0’ indicates that treatment with the antisense oligonucleotide did not inhibit mRNA levels.

[0351] The newly designed chimeric antisense oligonucleotides in the Tables below were designed as 3-10-3 cEt gapmers. The gapmers are 16 nucleosides in length, wherein the central gap segment comprises of ten 2′-deoxynucleosides and is flanked by wing segments on the 5′ direction and the 3′ direction comprising three nucleosides each. Each nucleoside in the 5′ wing segment and each nucleoside in the 3′ wing segment has a cEt sugar modification. The internucleoside linkages throughout each gapmer are phosphorothioate (P═S) linkages. All cytosine residues throughout each gapmer are 5-methylcytosines. “Start site” indicates the 5′-most nucleoside to which the gapmer is targeted in the human gene sequence. “Stop site” indicates the 3′-most nucleoside to which the gapmer is targeted human gene sequence. Each gapmer listed in the Tables below is targeted to either SEQ ID NO: 1 or SEQ ID NO: 2. ‘N/A’ indicates that the antisense oligonucleotide does not target that particular gene sequence with 100% complementarity.

TABLE 3
Inhibition of K-Ras mRNA by 3-10-3 cEt gapmers targeting
SEQ ID NO: 1 and 2

| | SEQ ID | SEQ ID | SEQ ID | SEQ ID | | | |
|---|---|---|---|---|---|---|---|
| | NO: 1 | NO: 1 | NO: 2 | NO: 2 | | | SEQ |
| ISIS | Start | Stop | Start | Stop | | % | ID |
| NO | Site | Site | Site | Site | Sequence | Inhibition | NO |
| 540806 | 2981 | 2996 | 45370 | 45385 | GCATGAAGATTTCTGG | 87 | 122 |
| 651467 | 148 | 163 | 2159 | 2174 | AGCCGCTGAGCCTCTG | 35 | 160 |
| 651470 | 228 | 243 | 7594 | 7609 | ACTCTTGCCTACGCCA | 73 | 161 |
| 651474 | 336 | 351 | 25563 | 25578 | CAAGAGACAGGTTTCT | 24 | 162 |
| 651475 | 348 | 363 | 25575 | 25590 | GTCGAGAATATCCAAG | 77 | 163 |
| 651476 | 354 | 369 | 25581 | 25596 | TGCTGTGTCGAGAATA | 58 | 164 |
| 651477 | 420 | 435 | 25647 | 25662 | TACACAAAGAAAGCCC | 76 | 165 |
| 651487 | 690 | 705 | 43079 | 43094 | GCTCATCTTTTCTTTA | 26 | 166 |
| 651490 | 786 | 801 | 43175 | 43190 | CACTTGTACTAGTATG | 63 | 167 |
| 651491 | 792 | 807 | 43181 | 43196 | AATTACCACTTGTACT | 21 | 168 |
| 651494 | 882 | 897 | 43271 | 43286 | ATTTAAGGTAAAAGCT | 4 | 169 |
| 651506 | 1093 | 1108 | 43482 | 43497 | GATTCAAAAGCTTCAT | 79 | 170 |
| 651507 | 1099 | 1114 | 43488 | 43503 | AGGGATGATTCAAAAG | 63 | 171 |
| 651512 | 1157 | 1172 | 43546 | 43561 | AAGGTCTCAACTGAAA | 39 | 172 |
| 651514 | 1175 | 1190 | 43564 | 43579 | TCAGTAAAAACCAATT | 24 | 173 |
| 651515 | 1184 | 1199 | 43573 | 43588 | CTCAATGTTTCAGTAA | 28 | 174 |
| 651524 | 1301 | 1316 | 43690 | 43705 | GTGGAAAGGAGACAAA | 48 | 175 |
| 651921 | 95 | 110 | 2106 | 2121 | TCCCAGTCCGAAATGG | 25 | 176 |
| 651922 | 159 | 174 | 2170 | 2185 | CCGCACCTGGGAGCCG | 32 | 177 |
| 651923 | 183 | 198 | 7549 | 7564 | AGTCATTTTCAGCAGG | 87 | 178 |
| 651924 | 195 | 210 | 7561 | 7576 | AAGTTTATATTCAGTC | 70 | 179 |
| 651925 | 204 | 219 | 7570 | 7585 | AACTACCACAAGTTTA | 43 | 180 |
| 651926 | 237 | 252 | 7603 | 7618 | CGTCAAGGCACTCTTG | 75 | 181 |
| 651927 | 252 | 267 | 7618 | 7633 | CTGAATTAGCTGTATC | 63 | 182 |
| 651928 | 312 | 327 | 25539 | 25554 | TACTACTTGCTTCCTG | 59 | 183 |
| 651929 | 322 | 337 | 25549 | 25564 | CTCCATCAATTACTAC | 48 | 184 |
| 651930 | 439 | 454 | 25666 | 25681 | TAGTATTATTTATGGC | 77 | 185 |
| 651931 | 448 | 463 | 25675 | 25690 | CAAATGATTTAGTATT | 8 | 186 |
| 651932 | 457 | 472 | 25684 | 25699 | GAATATCTTCAAATGA | 23 | 187 |
| 651933 | 485 | 500 | 27172 | 27187 | ACTCTTTTAATTTGTT | 27 | 188 |
| 651934 | 528 | 543 | 27215 | 27230 | TTTATTTCCTACTAGG | 45 | 189 |
| 651935 | 540 | 555 | 27227 | 27242 | AGGCAAATCACATTTA | 79 | 190 |
| 651936 | 551 | 566 | 27238 | 27253 | ACTGTTCTAGAAGGCA | 75 | 191 |
| 651938 | 648 | 663 | 43037 | 43052 | ATAGAAGGCATCATCA | 42 | 192 |
| 651939 | 679 | 694 | 43068 | 43083 | CTTTATGTTTTCGAAT | 5 | 193 |
| 651940 | 732 | 747 | 43121 | 43136 | ACACTTTGTCTTTGAC | 61 | 194 |
| 651941 | 741 | 756 | 43130 | 43145 | CATAATTACACACTTT | 32 | 195 |
| 651942 | 756 | 771 | 43145 | 43160 | TACAAATTGTATTTAC | 0 | 196 |
| 651943 | 771 | 786 | 43160 | 43175 | GCCTTAAGAAAAAAGT | 38 | 197 |
| 651944 | 816 | 831 | 43205 | 43220 | TAATAATTTAGTGTAA | 9 | 198 |
| 651945 | 835 | 850 | 43224 | 43239 | GTAATGCTAAAACAAA | 12 | 199 |
| 651946 | 844 | 859 | 43233 | 43248 | AAAAATTAGGTAATGC | 0 | 200 |
| 651947 | 860 | 875 | 43249 | 43264 | CTGCATGGAGCAGGAA | 31 | 201 |
| 651948 | 873 | 888 | 43262 | 43277 | AAAAGCTAACAGTCTG | 56 | 202 |
| 651949 | 907 | 922 | 43296 | 43311 | CTTCCACTGTCATTTT | 59 | 203 |
| 651950 | 927 | 942 | 43316 | 43331 | GCACTTAGAGGAAAAA | 44 | 204 |
| 651951 | 942 | 957 | 43331 | 43346 | ACTCTGGGAATACTGG | 82 | 205 |
| 651952 | 958 | 973 | 43347 | 43362 | TAGTTCAAAAACCAAA | 6 | 206 |
| 651953 | 967 | 982 | 43356 | 43371 | AGGCATTGCTAGTTCA | 83 | 207 |
| 651954 | 976 | 991 | 43365 | 43380 | CTTTTTCACAGGCATT | 75 | 208 |
| 651955 | 989 | 1004 | 43378 | 43393 | AGGTATTCAGTTTCTT | 79 | 209 |
| 651956 | 1001 | 1016 | 43390 | 43405 | GACAGAAATCTTAGGT | 51 | 210 |
| 651957 | 1010 | 1025 | N/A | N/A | AAACCCCAAGACAGAA | 16 | 211 |
| 651958 | 1019 | 1034 | N/A | N/A | ATGCACCAAAAACCCC | 69 | 212 |
| 651959 | 1028 | 1043 | 43417 | 43432 | ATCAACTGCATGCACC | 85 | 213 |
| 651960 | 1037 | 1052 | 43426 | 43441 | TAAGAAGTAATCAACT | 11 | 214 |
| 651961 | 1054 | 1069 | 43443 | 43458 | ACAATTGGTAAGAAAA | 4 | 215 |
| 651962 | 1063 | 1078 | 43452 | 43467 | CCAACATTCACAATTG | 53 | 216 |
| 651963 | 1078 | 1093 | 43467 | 43482 | TTAATTTGTTTCACAC | 34 | 217 |
| 651964 | 1110 | 1125 | 43499 | 43514 | AAACACAGAATAGGGA | 21 | 218 |
| 651965 | 1119 | 1134 | 43508 | 43523 | GACTAGATAAAACACA | 67 | 219 |
| 651966 | 1128 | 1143 | 43517 | 43532 | CATTTATGTGACTAGA | 79 | 220 |
| 651967 | 1138 | 1153 | 43527 | 43542 | GTAATTAATCCATTTA | 53 | 221 |
| 651968 | 1147 | 1162 | 43536 | 43551 | CTGAAATTAGTAATTA | 6 | 222 |
| 651969 | 1166 | 1181 | 43555 | 43570 | ACCAATTAGAAGGTCT | 38 | 223 |
| 651970 | 1195 | 1210 | 43584 | 43599 | ATTTGTGTTCCCTCAA | 68 | 224 |
| 651971 | 1204 | 1219 | 43593 | 43608 | AGCCCATAAATTTGTG | 42 | 225 |
| 651972 | 1213 | 1228 | 43602 | 43617 | TCATCAGGAAGCCCAT | 83 | 226 |
| 651973 | 1222 | 1237 | 43611 | 43626 | GAAGAATCATCATCAG | 78 | 227 |
| 651974 | 1233 | 1248 | 43622 | 43637 | CATGATGCCTAGAAGA | 41 | 228 |
| 651975 | 1245 | 1260 | 43634 | 43649 | CAAACTATAGGACATG | 56 | 229 |
| 651976 | 1254 | 1269 | 43643 | 43658 | CAGGGATGACAAACTA | 63 | 230 |
| 651977 | 1264 | 1279 | 43653 | 43668 | TTACATTCATCAGGGA | 9 | 231 |
| 651978 | 1273 | 1288 | 43662 | 43677 | AGTGTAACTTTACATT | 41 | 232 |
| 651979 | 1283 | 1298 | 43672 | 43687 | CTTTGTGAACAGTGTA | 79 | 233 |
| 651980 | 1296 | 1311 | 43685 | 43700 | AAGGAGACAAAACCTT | 3 | 234 |

TABLE 4
Inhibition of K-Ras mRNA by 3-10-3 cEt gapmers targeting
SEQ ID NO: 1 and 2

| | SEQ ID | SEQ ID | SEQ ID | SEQ ID | | | |
|---|---|---|---|---|---|---|---|
| | NO: 1 | NO: 1 | NO: 2 | NO: 2 | | | SEQ |
| ISIS | Start | Stop | Start | Stop | | % | ID |
| NO | Site | Site | Site | Site | Sequence | Inhibition | NO |
| 540734 | 1924 | 1939 | 44313 | 44328 | AATGCTCTTGATTTGT | 71 | 89 |
| 540767 | 1316 | 1331 | 43705 | 43720 | CCATGACTAATAGCAG | 77 | 29 |
| 540777 | 1709 | 1724 | 44098 | 44113 | GCTATAACTGGCCCAA | 71 | 34 |
| 540779 | 1898 | 1913 | 44287 | 44302 | ACCACAGAGTGAGATT | 73 | 35 |
| 540806 | 2981 | 2996 | 45370 | 45385 | GCATGAAGATTTCTGG | 81 | 122 |
| 651526 | 1305 | 1320 | 43694 | 43709 | AGCAGTGGAAAGGAGA | 61 | 235 |
| 651527 | 1307 | 1322 | 43696 | 43711 | ATAGCAGTGGAAAGGA | 61 | 236 |
| 651528 | 1309 | 1324 | 43698 | 43713 | TAATAGCAGTGGAAAG | 24 | 237 |
| 651529 | 1311 | 1326 | 43700 | 43715 | ACTAATAGCAGTGGAA | 44 | 238 |
| 651530 | 1313 | 1328 | 43702 | 43717 | TGACTAATAGCAGTGG | 83 | 239 |
| 651531 | 1315 | 1330 | 43704 | 43719 | CATGACTAATAGCAGT | 56 | 240 |
| 651533 | 1319 | 1334 | 43708 | 43723 | TGACCATGACTAATAG | 52 | 241 |
| 651534 | 1321 | 1336 | 43710 | 43725 | AGTGACCATGACTAAT | 68 | 242 |
| 651537 | 1398 | 1413 | 43787 | 43802 | CTTATAATAGTTTCCA | 65 | 243 |
| 651542 | 1470 | 1485 | 43859 | 43874 | CTGGGTCTGCCTTAAC | 59 | 244 |
| 651543 | 1476 | 1491 | 43865 | 43880 | TTCATACTGGGTCTGC | 78 | 245 |
| 651547 | 1601 | 1616 | 43990 | 44005 | GACACAGGGAGACTAC | 67 | 246 |
| 651548 | 1603 | 1618 | 43992 | 44007 | CTGACACAGGGAGACT | 71 | 247 |
| 651551 | 1609 | 1624 | 43998 | 44013 | AGCAGTCTGACACAGG | 80 | 248 |
| 651557 | 1704 | 1719 | 44093 | 44108 | AACTGGCCCAAATAAT | 29 | 249 |
| 651558 | 1706 | 1721 | 44095 | 44110 | ATAACTGGCCCAAATA | 35 | 250 |
| 651559 | 1708 | 1723 | 44097 | 44112 | CTATAACTGGCCCAAA | 23 | 251 |
| 651560 | 1710 | 1725 | 44099 | 44114 | AGCTATAACTGGCCCA | 73 | 252 |
| 651561 | 1712 | 1727 | 44101 | 44116 | TAAGCTATAACTGGCC | 70 | 253 |
| 651562 | 1714 | 1729 | 44103 | 44118 | AATAAGCTATAACTGG | 30 | 254 |
| 651571 | 1816 | 1831 | 44205 | 44220 | ACTGGATGACCGTGGG | 63 | 255 |
| 651578 | 1897 | 1912 | 44286 | 44301 | CCACAGAGTGAGATTG | 67 | 256 |
| 651579 | 1899 | 1914 | 44288 | 44303 | CACCACAGAGTGAGAT | 48 | 257 |
| 651580 | 1901 | 1916 | 44290 | 44305 | ACCACCACAGAGTGAG | 72 | 258 |
| 651581 | 1903 | 1918 | 44292 | 44307 | GGACCACCACAGAGTG | 62 | 259 |
| 651583 | 1907 | 1922 | 44296 | 44311 | AGCAGGACCACCACAG | 52 | 260 |
| 651586 | 1913 | 1928 | 44302 | 44317 | TTTGTCAGCAGGACCA | 86 | 261 |
| 651589 | 1921 | 1936 | 44310 | 44325 | GCTCTTGATTTGTCAG | 68 | 262 |
| 651591 | 1927 | 1942 | 44316 | 44331 | AGCAATGCTCTTGATT | 49 | 263 |
| 651592 | 1929 | 1944 | 44318 | 44333 | AAAGCAATGCTCTTGA | 53 | 264 |
| 651595 | 2020 | 2035 | 44409 | 44424 | ATGTCTTGGCACACCA | 81 | 265 |
| 651981 | 1340 | 1355 | 43729 | 43744 | AATATAATATTTTGGG | 10 | 266 |
| 651982 | 1387 | 1402 | 43776 | 43791 | TTCCATTGCCTTGTAA | 49 | 267 |
| 651983 | 1408 | 1423 | 43797 | 43812 | AGGAAATGGCCTTATA | 50 | 268 |
| 651984 | 1419 | 1434 | 43808 | 43823 | CTAATGTGAAAAGGAA | 16 | 269 |
| 651985 | 1429 | 1444 | 43818 | 43833 | AGTAATTTATCTAATG | 5 | 270 |
| 651986 | 1438 | 1453 | 43827 | 43842 | AGTCTTTATAGTAATT | 42 | 271 |
| 651987 | 1447 | 1462 | 43836 | 43851 | GCTATTAGGAGTCTTT | 82 | 272 |
| 651988 | 1456 | 1471 | 43845 | 43860 | ACAGGAAAAGCTATTA | 51 | 273 |
| 651989 | 1481 | 1496 | 43870 | 43885 | CCCATTTCATACTGGG | 2 | 274 |
| 651990 | 1493 | 1508 | 43882 | 43897 | GCTATAATAATCCCCA | 86 | 275 |
| 651991 | 1502 | 1517 | 43891 | 43906 | AAAATGGTTGCTATAA | 0 | 276 |
| 651992 | 1513 | 1528 | 43902 | 43917 | AATATAGCCCCAAAAT | 22 | 277 |
| 651993 | 1531 | 1546 | 43920 | 43935 | AAAATTTAGTAGCATG | 13 | 278 |
| 651994 | 1561 | 1576 | 43950 | 43965 | ATACTTGTTAAAATCT | 23 | 279 |
| 651995 | 1570 | 1585 | 43959 | 43974 | GAATTTTTTATACTTG | 13 | 280 |
| 651996 | 1579 | 1594 | 43968 | 43983 | TTCCTATGAGAATTTT | 62 | 281 |
| 651997 | 1588 | 1603 | 43977 | 43992 | TACATTTAATTCCTAT | 4 | 282 |
| 651998 | 1620 | 1635 | 44009 | 44024 | TACTATGAAAGAGCAG | 78 | 283 |
| 651999 | 1629 | 1644 | 44018 | 44033 | TTAAAGTTATACTATG | 10 | 284 |
| 652000 | 1643 | 1658 | 44032 | 44047 | GTTGAAGAAAAGATTT | 15 | 285 |
| 652001 | 1652 | 1667 | 44041 | 44056 | AAGACTCAAGTTGAAG | 72 | 286 |
| 652002 | 1661 | 1676 | 44050 | 44065 | CTATCTTCAAAGACTC | 87 | 287 |
| 652003 | 1672 | 1687 | 44061 | 44076 | CAGAATTAAAACTATC | 15 | 288 |
| 652004 | 1685 | 1700 | 44074 | 44089 | TTAATGTCACAAGCAG | 88 | 289 |
| 652005 | 1699 | 1714 | 44088 | 44103 | GCCCAAATAATCTTTT | 47 | 290 |
| 652006 | 1723 | 1738 | 44112 | 44127 | TCAACACCTAATAAGC | 46 | 291 |
| 652007 | 1736 | 1751 | 44125 | 44140 | AACCTTGGTCTCTTCA | 77 | 292 |
| 652008 | 1758 | 1773 | 44147 | 44162 | TTCACACAGGGCCTGG | 65 | 293 |
| 652009 | 1767 | 1782 | 44156 | 44171 | GCTCAAAGGTTCACAC | 71 | 294 |
| 652010 | 1776 | 1791 | 44165 | 44180 | TCTATGAAAGCTCAAA | 51 | 295 |
| 652011 | 1785 | 1800 | 44174 | 44189 | GTGAAACTCTCTATGA | 55 | 296 |
| 652012 | 1794 | 1809 | 44183 | 44198 | GTCCATGCTGTGAAAC | 31 | 297 |
| 652013 | 1825 | 1840 | 44214 | 44229 | CATGACAACACTGGAT | 56 | 298 |
| 652014 | 1834 | 1849 | 44223 | 44238 | TAACCAATGCATGACA | 67 | 299 |
| 652015 | 1846 | 1861 | 44235 | 44250 | CCCCATTTTGACTAAC | 38 | 300 |
| 652016 | 1862 | 1877 | 44251 | 44266 | AACTGCCCTAGTCCCT | 61 | 301 |
| 652017 | 1871 | 1886 | 44260 | 44275 | AGCTATCCAAACTGCC | 44 | 302 |
| 652018 | 1880 | 1895 | 44269 | 44284 | ATCTTGTTGAGCTATC | 75 | 303 |
| 652019 | 1918 | 1933 | 44307 | 44322 | CTTGATTTGTCAGCAG | 80 | 304 |
| 652020 | 1990 | 2005 | 44379 | 44394 | CAACTTTTGAGTTAAT | 14 | 305 |
| 652021 | 2001 | 2016 | 44390 | 44405 | CCCCAAAATCTCAACT | 20 | 306 |
| 652022 | 2010 | 2025 | 44399 | 44414 | ACACCACCACCCCAAA | 46 | 307 |

TABLE 5
Inhibition of K-Ras mRNA by 3-10-3 cEt gapmers targeting
SEQ ID NO: 1 and 2

| | SEQ ID | SEQ ID | SEQ ID | SEQ ID | | | |
|---|---|---|---|---|---|---|---|
| | NO: 1 | NO: 1 | NO: 2 | NO: 2 | | | SEQ |
| ISIS | Start | Stop | Start | Stop | | % | ID |
| NO | Site | Site | Site | Site | Sequence | Inhibition | NO |
| 540806 | 2981 | 2996 | 45370 | 45385 | GCATGAAGATTTCTGG | 83 | 122 |
| 651601 | 2099 | 2114 | 44488 | 44503 | AATTTAACCAGTGTTA | 40 | 308 |
| 651602 | 2105 | 2120 | 44494 | 44509 | AATGTTAATTTAACCA | 27 | 309 |
| 651604 | 2129 | 2144 | 44518 | 44533 | ATCAGACTTGAAAAGT | 58 | 310 |
| 651605 | 2135 | 2150 | 44524 | 44539 | ATATGGATCAGACTTG | 74 | 311 |
| 651623 | 2466 | 2481 | 44855 | 44870 | AAGATGGTGTAACATA | 68 | 312 |
| 651629 | 2600 | 2615 | 44989 | 45004 | CTGCATCAAGTCATGG | 73 | 313 |
| 651630 | 2602 | 2617 | 44991 | 45006 | AACTGCATCAAGTCAT | 64 | 314 |
| 651631 | 2604 | 2619 | 44993 | 45008 | AAAACTGCATCAAGTC | 72 | 315 |
| 651634 | 2634 | 2649 | 45023 | 45038 | AATCTTATGGTTAGGG | 85 | 316 |
| 651637 | 2676 | 2691 | 45065 | 45080 | ACTCAGTGGGAAAACT | 33 | 317 |
| 651638 | 2678 | 2693 | 45067 | 45082 | TGACTCAGTGGGAAAA | 59 | 318 |
| 651641 | 2684 | 2699 | 45073 | 45088 | CTGATGTGACTCAGTG | 76 | 319 |
| 651642 | 2686 | 2701 | 45075 | 45090 | TTCTGATGTGACTCAG | 65 | 320 |
| 651645 | 2733 | 2748 | 45122 | 45137 | TATCTGTCAGATTCTC | 83 | 321 |
| 651646 | 2735 | 2750 | 45124 | 45139 | GGTATCTGTCAGATTC | 89 | 322 |
| 651647 | 2737 | 2752 | 45126 | 45141 | ATGGTATCTGTCAGAT | 84 | 323 |
| 651649 | 2741 | 2756 | 45130 | 45145 | CTTTATGGTATCTGTC | 67 | 324 |
| 651650 | 2743 | 2758 | 45132 | 45147 | CCCTTTATGGTATCTG | 76 | 325 |
| 651659 | 2815 | 2830 | 45204 | 45219 | GCTAATGGATTGGGCA | 17 | 326 |
| 651660 | 2817 | 2832 | 45206 | 45221 | TCGCTAATGGATTGGG | 67 | 327 |
| 651662 | 2821 | 2836 | 45210 | 45225 | ACTGTCGCTAATGGAT | 43 | 328 |
| 652023 | 2047 | 2062 | 44436 | 44451 | TCACTTCATTGTTTAA | 70 | 329 |
| 652024 | 2056 | 2071 | 44445 | 44460 | AAAACTTTTTCACTTC | 62 | 330 |
| 652025 | 2065 | 2080 | 44454 | 44469 | AGAGATTGTAAAACTT | 21 | 331 |
| 652026 | 2074 | 2089 | 44463 | 44478 | GCCAAACCTAGAGATT | 42 | 332 |
| 652027 | 2083 | 2098 | 44472 | 44487 | AGAGAACTAGCCAAAC | 62 | 333 |
| 652028 | 2093 | 2108 | 44482 | 44497 | ACCAGTGTTAAGAGAA | 78 | 334 |
| 652029 | 2118 | 2133 | 44507 | 44522 | AAAGTGTTTATGCAAT | 49 | 335 |
| 652030 | 2146 | 2161 | 44535 | 44550 | AGCATTATTAAATATG | 14 | 336 |
| 652031 | 2176 | 2191 | 44565 | 44580 | TCAAAAGGATTGTTTT | 2 | 337 |
| 652032 | 2228 | 2243 | 44617 | 44632 | CACCATGCCATCTCAC | 47 | 338 |
| 652033 | 2237 | 2252 | 44626 | 44641 | CTTTCACCTCACCATG | 38 | 339 |
| 652034 | 2248 | 2263 | 44637 | 44652 | GTCCAGTGATACTTTC | 77 | 340 |
| 652035 | 2258 | 2273 | 44647 | 44662 | CTTCTTCCTAGTCCAG | 72 | 341 |
| 652036 | 2268 | 2283 | 44657 | 44672 | CCTAAGTCACCTTCTT | 47 | 342 |
| 652037 | 2277 | 2292 | 44666 | 44681 | TATCTAGAACCTAAGT | 8 | 343 |
| 652038 | 2286 | 2301 | 44675 | 44690 | AAAGACACCTATCTAG | 1 | 344 |
| 652039 | 2297 | 2312 | 44686 | 44701 | TCAGAGTCCTAAAAGA | 2 | 345 |
| 652040 | 2306 | 2321 | 44695 | 44710 | TCCTCAAAATCAGAGT | 42 | 346 |
| 652041 | 2323 | 2338 | 44712 | 44727 | ATGGATAGTAAGTGAT | 51 | 347 |
| 652042 | 2333 | 2348 | 44722 | 44737 | ACATGAAGAAATGGAT | 12 | 348 |
| 652043 | 2342 | 2357 | 44731 | 44746 | CTTCTTTTAACATGAA | 9 | 349 |
| 652044 | 2352 | 2367 | 44741 | 44756 | TTTGAGATGACTTCTT | 51 | 350 |
| 652045 | 2361 | 2376 | 44750 | 44765 | AACTAAGAGTTTGAGA | 17 | 351 |
| 652046 | 2385 | 2400 | 44774 | 44789 | AATTACATAGTTGTAA | 0 | 352 |
| 652047 | 2405 | 2420 | 44794 | 44809 | CCTTATGTAAATGGAA | 33 | 353 |
| 652048 | 2414 | 2429 | 44803 | 44818 | TAAGTGTATCCTTATG | 56 | 354 |
| 652049 | 2423 | 2438 | 44812 | 44827 | CTTGACAAATAAGTGT | 48 | 355 |
| 652050 | 2434 | 2449 | 44823 | 44838 | ATTGTGCTGAGCTTGA | 78 | 356 |
| 652051 | 2450 | 2465 | 44839 | 44854 | GGTTAAAAATTTACAG | 22 | 357 |
| 652052 | 2478 | 2493 | 44867 | 44882 | AGACTGGCACTGAAGA | 54 | 358 |
| 652053 | 2507 | 2522 | 44896 | 44911 | AAACTTCACCTCTTGC | 62 | 359 |
| 652054 | 2522 | 2537 | 44911 | 44926 | TGGATATTCAAATATA | 12 | 360 |
| 652055 | 2531 | 2546 | 44920 | 44935 | AAACGAGAATGGATAT | 28 | 361 |
| 652056 | 2547 | 2562 | 44936 | 44951 | TGGAAGAAGAGTCCTA | 14 | 362 |
| 652057 | 2561 | 2576 | 44950 | 44965 | AGATGACACTAATATG | 49 | 363 |
| 652058 | 2576 | 2591 | 44965 | 44980 | GAAGGTAGGGAGGCAA | 38 | 364 |
| 652059 | 2613 | 2628 | 45002 | 45017 | ACAAGTATTAAAACTG | 17 | 365 |
| 652060 | 2643 | 2658 | 45032 | 45047 | GCAGCAGTAAATCTTA | 60 | 366 |
| 652061 | 2652 | 2667 | 45041 | 45056 | ATATCCACAGCAGCAG | 70 | 367 |
| 652062 | 2662 | 2677 | 45051 | 45066 | CTTCATGGAGATATCC | 68 | 368 |
| 652063 | 2699 | 2714 | 45088 | 45103 | AGATGTAGGGCATTTC | 54 | 369 |
| 652064 | 2708 | 2723 | 45097 | 45112 | GAGGAAATAAGATGTA | 15 | 370 |
| 652065 | 2723 | 2738 | 45112 | 45127 | ATTCTCTTGAGCCCTG | 65 | 371 |
| 652066 | 2755 | 2770 | 45144 | 45159 | ATTAGGTCAAATCCCT | 72 | 372 |
| 652067 | 2764 | 2779 | 45153 | 45168 | AAATTAGTGATTAGGT | 32 | 373 |
| 652068 | 2773 | 2788 | 45162 | 45177 | ACCACCTGAAAATTAG | 24 | 374 |
| 652069 | 2785 | 2800 | 45174 | 45189 | AAAGCATCAGCCACCA | 46 | 375 |
| 652070 | 2799 | 2814 | 45188 | 45203 | GCAAAGAGATGTTCAA | 43 | 376 |
| 652071 | 2832 | 2847 | 45221 | 45236 | TGAAAAATCCTACTGT | 12 | 377 |
| 652072 | 2841 | 2856 | 45230 | 45245 | TACCAGGTTTGAAAAA | 23 | 378 |
| 652073 | 2864 | 2879 | 45253 | 45268 | CTGGATAGGGTTCTGT | 40 | 379 |
| 652074 | 2873 | 2888 | 45262 | 45277 | CTCCTTCCACTGGATA | 31 | 380 |
| 652075 | 2885 | 2900 | 45274 | 45289 | CTTTATTAAATTCTCC | 26 | 381 |
| 652076 | 2894 | 2909 | 45283 | 45298 | CAGCACTATCTTTATT | 33 | 382 |
| 652077 | 2906 | 2921 | 45295 | 45310 | AAGGAATTCTTTCAGC | 58 | 383 |
| 652078 | 2915 | 2930 | 45304 | 45319 | AGATTACCTAAGGAAT | 23 | 384 |

### Example 3: Antisense Inhibition of Human K-Ras in A431 Cells by cEt Gapmers

[0352] Antisense oligonucleotides were designed targeting a K-Ras nucleic acid and were tested for their effects on K-Ras mRNA in vitro. The antisense oligonucleotides were tested in a series of experiments that had similar culture conditions. The results for each experiment are presented in separate tables shown below. Cultured A431 cells at a density of 5,000 cells per well were treated with 1,000 nM antisense oligonucleotide by free uptake. After a treatment period of approximately 24 hours, RNA was isolated from the cells and K-Ras mRNA levels were measured by quantitative real-time PCR. Human primer probe set RTS3496_MGB was used to measure mRNA levels. K-Ras mRNA levels were adjusted according to total RNA content, as measured by RIBOGREEN®. Results are presented as percent inhibition of K-Ras, relative to untreated control cells. As used herein, a value of ‘0’ indicates that treatment with the antisense oligonucleotide did not inhibit mRNA levels.

[0353] The newly designed chimeric antisense oligonucleotides in the Tables below were designed as 3-10-3 cEt gapmers. The gapmers are 16 nucleosides in length, wherein the central gap segment comprises of ten 2′-deoxynucleosides and is flanked by wing segments on the 5′ direction and the 3′ direction comprising three nucleosides each. Each nucleoside in the 5′ wing segment and each nucleoside in the 3′ wing segment has a cEt sugar modification. The internucleoside linkages throughout each gapmer are phosphorothioate (P═S) linkages. All cytosine residues throughout each gapmer are 5-methylcytosines. “Start site” indicates the 5′-most nucleoside to which the gapmer is targeted in the human gene sequence. “Stop site” indicates the 3′-most nucleoside to which the gapmer is targeted human gene sequence. Each gapmer listed in the Tables below is targeted to either SEQ ID NO: 1 or SEQ ID NO: 2. ‘N/A’ indicates that the antisense oligonucleotide does not target that particular gene sequence with 100% complementarity.

TABLE 6
Inhibition of K-Ras mRNA by 3-10-3 cEt gapmers targeting
SEQ ID NO: 1 and 2

| | SEQ ID | SEQ ID | SEQ ID | SEQ ID | | | |
|---|---|---|---|---|---|---|---|
| | NO: 1 | NO: 1 | NO: 2 | NO: 2 | | | SEQ |
| ISIS | Start | Stop | Start | Stop | | % | ID |
| NO | Site | Site | Site | Site | Sequence | Inhibition | NO |
| 540806 | 2981 | 2996 | 45370 | 45385 | GCATGAAGATTTCTGG | 65 | 122 |
| 540806 | 2981 | 2996 | 45370 | 45385 | GCATGAAGATTTCTGG | 63 | 122 |
| 651530 | 1313 | 1328 | 43702 | 43717 | TGACTAATAGCAGTGG | 69 | 239 |
| 651538 | 1421 | 1436 | 43810 | 43825 | ATCTAATGTGAAAAGG | 8 | 385 |
| 651539 | 1427 | 1442 | 43816 | 43831 | TAATTTATCTAATGTG | 0 | 386 |
| 651540 | 1443 | 1458 | 43832 | 43847 | TTAGGAGTCTTTATAG | 33 | 387 |
| 651541 | 1449 | 1464 | 43838 | 43853 | AAGCTATTAGGAGTCT | 60 | 388 |
| 651544 | 1494 | 1509 | 43883 | 43898 | TGCTATAATAATCCCC | 47 | 389 |
| 651545 | 1582 | 1597 | 43971 | 43986 | TAATTCCTATGAGAAT | 18 | 390 |
| 651552 | 1611 | 1626 | 44000 | 44015 | AGAGCAGTCTGACACA | 40 | 391 |
| 651987 | 1447 | 1462 | 43836 | 43851 | GCTATTAGGAGTCTTT | 72 | 272 |
| 651990 | 1493 | 1508 | 43882 | 43897 | GCTATAATAATCCCCA | 53 | 275 |
| 663529 | 1522 | 1537 | 43911 | 43926 | TAGCATGTAAATATAG | 24 | 392 |
| 695897 | 1249 | 1264 | 43638 | 43653 | ATGACAAACTATAGGA | 34 | 393 |
| 695898 | 1251 | 1266 | 43640 | 43655 | GGATGACAAACTATAG | 35 | 394 |
| 695899 | 1256 | 1271 | 43645 | 43660 | ATCAGGGATGACAAAC | 15 | 395 |
| 695900 | 1258 | 1273 | 43647 | 43662 | TCATCAGGGATGACAA | 17 | 396 |
| 695901 | 1260 | 1275 | 43649 | 43664 | ATTCATCAGGGATGAC | 20 | 397 |
| 695902 | 1262 | 1277 | 43651 | 43666 | ACATTCATCAGGGATG | 0 | 398 |
| 695903 | 1269 | 1284 | 43658 | 43673 | TAACTTTACATTCATC | 21 | 399 |
| 695904 | 1275 | 1290 | 43664 | 43679 | ACAGTGTAACTTTACA | 38 | 400 |
| 695905 | 1277 | 1292 | 43666 | 43681 | GAACAGTGTAACTTTA | 26 | 401 |
| 695906 | 1279 | 1294 | 43668 | 43683 | GTGAACAGTGTAACTT | 44 | 402 |
| 695907 | 1281 | 1296 | 43670 | 43685 | TTGTGAACAGTGTAAC | 44 | 403 |
| 695908 | 1285 | 1300 | 43674 | 43689 | ACCTTTGTGAACAGTG | 48 | 404 |
| 695909 | 1287 | 1302 | 43676 | 43691 | AAACCTTTGTGAACAG | 48 | 405 |
| 695910 | 1289 | 1304 | 43678 | 43693 | CAAAACCTTTGTGAAC | 3 | 406 |
| 695911 | 1293 | 1308 | 43682 | 43697 | GAGACAAAACCTTTGT | 10 | 407 |
| 695912 | 1312 | 1327 | 43701 | 43716 | GACTAATAGCAGTGGA | 67 | 408 |
| 695913 | 1314 | 1329 | 43703 | 43718 | ATGACTAATAGCAGTG | 35 | 409 |
| 695914 | 1323 | 1338 | 43712 | 43727 | AGAGTGACCATGACTA | 42 | 410 |
| 695915 | 1385 | 1400 | 43774 | 43789 | CCATTGCCTTGTAATT | 37 | 411 |
| 695916 | 1391 | 1406 | 43780 | 43795 | TAGTTTCCATTGCCTT | 44 | 412 |
| 695917 | 1393 | 1408 | 43782 | 43797 | AATAGTTTCCATTGCC | 64 | 413 |
| 695918 | 1395 | 1410 | 43784 | 43799 | ATAATAGTTTCCATTG | 14 | 414 |
| 695919 | 1400 | 1415 | 43789 | 43804 | GCCTTATAATAGTTTC | 44 | 415 |
| 695920 | 1403 | 1418 | 43792 | 43807 | ATGGCCTTATAATAGT | 25 | 416 |
| 695921 | 1405 | 1420 | 43794 | 43809 | AAATGGCCTTATAATA | 0 | 417 |
| 695922 | 1439 | 1454 | 43828 | 43843 | GAGTCTTTATAGTAAT | 32 | 418 |
| 695923 | 1440 | 1455 | 43829 | 43844 | GGAGTCTTTATAGTAA | 45 | 419 |
| 695924 | 1441 | 1456 | 43830 | 43845 | AGGAGTCTTTATAGTA | 69 | 420 |
| 695925 | 1442 | 1457 | 43831 | 43846 | TAGGAGTCTTTATAGT | 48 | 421 |
| 695926 | 1444 | 1459 | 43833 | 43848 | ATTAGGAGTCTTTATA | 37 | 422 |
| 695927 | 1445 | 1460 | 43834 | 43849 | TATTAGGAGTCTTTAT | 18 | 423 |
| 695928 | 1446 | 1461 | 43835 | 43850 | CTATTAGGAGTCTTTA | 30 | 424 |
| 695929 | 1448 | 1463 | 43837 | 43852 | AGCTATTAGGAGTCTT | 29 | 425 |
| 695930 | 1450 | 1465 | 43839 | 43854 | AAAGCTATTAGGAGTC | 70 | 426 |
| 695931 | 1451 | 1466 | 43840 | 43855 | AAAAGCTATTAGGAGT | 29 | 427 |
| 695932 | 1452 | 1467 | 43841 | 43856 | GAAAAGCTATTAGGAG | 32 | 428 |
| 695933 | 1453 | 1468 | 43842 | 43857 | GGAAAAGCTATTAGGA | 43 | 429 |
| 695934 | 1454 | 1469 | 43843 | 43858 | AGGAAAAGCTATTAGG | 48 | 430 |
| 695935 | 1455 | 1470 | 43844 | 43859 | CAGGAAAAGCTATTAG | 47 | 431 |
| 695936 | 1464 | 1479 | 43853 | 43868 | CTGCCTTAACAGGAAA | 43 | 432 |
| 695937 | 1478 | 1493 | 43867 | 43882 | ATTTCATACTGGGTCT | 46 | 433 |
| 695938 | 1483 | 1498 | 43872 | 43887 | TCCCCATTTCATACTG | 14 | 434 |
| 695939 | 1492 | 1507 | 43881 | 43896 | CTATAATAATCCCCAT | 23 | 435 |
| 695940 | 1495 | 1510 | 43884 | 43899 | TTGCTATAATAATCCC | 57 | 436 |
| 695941 | 1496 | 1511 | 43885 | 43900 | GTTGCTATAATAATCC | 29 | 437 |
| 695942 | 1497 | 1512 | 43886 | 43901 | GGTTGCTATAATAATC | 35 | 438 |
| 695943 | 1498 | 1513 | 43887 | 43902 | TGGTTGCTATAATAAT | 0 | 439 |
| 695944 | 1499 | 1514 | 43888 | 43903 | ATGGTTGCTATAATAA | 26 | 440 |
| 695945 | 1500 | 1515 | 43889 | 43904 | AATGGTTGCTATAATA | 12 | 441 |
| 695946 | 1501 | 1516 | 43890 | 43905 | AAATGGTTGCTATAAT | 5 | 442 |
| 695947 | 1504 | 1519 | 43893 | 43908 | CCAAAATGGTTGCTAT | 18 | 443 |
| 695948 | 1516 | 1531 | 43905 | 43920 | GTAAATATAGCCCCAA | 45 | 444 |
| 695949 | 1518 | 1533 | 43907 | 43922 | ATGTAAATATAGCCCC | 36 | 445 |
| 695950 | 1524 | 1539 | 43913 | 43928 | AGTAGCATGTAAATAT | 28 | 446 |
| 695951 | 1528 | 1543 | 43917 | 43932 | ATTTAGTAGCATGTAA | 17 | 447 |
| 695952 | 1584 | 1599 | 43973 | 43988 | TTTAATTCCTATGAGA | 20 | 448 |
| 695953 | 1591 | 1606 | 43980 | 43995 | GACTACATTTAATTCC | 0 | 449 |
| 695954 | 1594 | 1609 | 43983 | 43998 | GGAGACTACATTTAAT | 12 | 450 |
| 695955 | 1597 | 1612 | 43986 | 44001 | CAGGGAGACTACATTT | 22 | 451 |
| 695956 | 1610 | 1625 | 43999 | 44014 | GAGCAGTCTGACACAG | 41 | 452 |
| 695957 | 1613 | 1628 | 44002 | 44017 | AAAGAGCAGTCTGACA | 36 | 453 |
| 695958 | 1614 | 1629 | 44003 | 44018 | GAAAGAGCAGTCTGAC | 49 | 454 |
| 695959 | 1615 | 1630 | 44004 | 44019 | TGAAAGAGCAGTCTGA | 36 | 455 |
| 695960 | 1616 | 1631 | 44005 | 44020 | ATGAAAGAGCAGTCTG | 41 | 456 |
| 695961 | 1617 | 1632 | 44006 | 44021 | TATGAAAGAGCAGTCT | 23 | 457 |
| 695962 | 1618 | 1633 | 44007 | 44022 | CTATGAAAGAGCAGTC | 33 | 458 |

TABLE 7
Inhibition of K-Ras mRNA by 3-10-3 cEt gapmers targeting
SEQ ID NO: 1 and 2

| | SEQ ID | SEQ ID | SEQ ID | SEQ ID | | | |
|---|---|---|---|---|---|---|---|
| | NO: 1 | NO: 1 | NO: 2 | NO: 2 | | | SEQ |
| ISIS | Start | Stop | Start | Stop | | % | ID |
| NO | Site | Site | Site | Site | Sequence | Inhibition | NO |
| 540806 | 2981 | 2996 | 45370 | 45385 | GCATGAAGATTTCTGG | 58 | 122 |
| 540806 | 2981 | 2996 | 45370 | 45385 | GCATGAAGATTTCTGG | 63 | 122 |
| 651497 | 948 | 963 | 43337 | 43352 | ACCAAAACTCTGGGAA | 19 | 459 |
| 651498 | 959 | 974 | 43348 | 43363 | CTAGTTCAAAAACCAA | 0 | 460 |
| 651499 | 965 | 980 | 43354 | 43369 | GCATTGCTAGTTCAAA | 53 | 461 |
| 651501 | 1014 | 1029 | N/A | N/A | CCAAAAACCCCAAGAC | 33 | 462 |
| 651502 | 1026 | 1041 | 43415 | 43430 | CAACTGCATGCACCAA | 49 | 463 |
| 651503 | 1032 | 1047 | 43421 | 43436 | AGTAATCAACTGCATG | 35 | 464 |
| 651509 | 1124 | 1139 | 43513 | 43528 | TATGTGACTAGATAAA | 10 | 465 |
| 651510 | 1142 | 1157 | 43531 | 43546 | ATTAGTAATTAATCCA | 34 | 466 |
| 663502 | 1025 | 1040 | 43414 | 43429 | AACTGCATGCACCAAA | 30 | 467 |
| 695829 | 943 | 958 | 43332 | 43347 | AACTCTGGGAATACTG | 36 | 468 |
| 695830 | 944 | 959 | 43333 | 43348 | AAACTCTGGGAATACT | 6 | 469 |
| 695831 | 949 | 964 | 43338 | 43353 | AACCAAAACTCTGGGA | 5 | 470 |
| 695832 | 960 | 975 | 43349 | 43364 | GCTAGTTCAAAAACCA | 52 | 471 |
| 695833 | 962 | 977 | 43351 | 43366 | TTGCTAGTTCAAAAAC | 31 | 472 |
| 695834 | 963 | 978 | 43352 | 43367 | ATTGCTAGTTCAAAAA | 0 | 473 |
| 695835 | 964 | 979 | 43353 | 43368 | CATTGCTAGTTCAAAA | 32 | 474 |
| 695836 | 966 | 981 | 43355 | 43370 | GGCATTGCTAGTTCAA | 51 | 475 |
| 695837 | 970 | 985 | 43359 | 43374 | CACAGGCATTGCTAGT | 12 | 476 |
| 695838 | 971 | 986 | 43360 | 43375 | TCACAGGCATTGCTAG | 2 | 477 |
| 695839 | 972 | 987 | 43361 | 43376 | TTCACAGGCATTGCTA | 27 | 478 |
| 695840 | 994 | 1009 | 43383 | 43398 | ATCTTAGGTATTCAGT | 30 | 479 |
| 695841 | 999 | 1014 | 43388 | 43403 | CAGAAATCTTAGGTAT | 13 | 480 |
| 695842 | 1007 | 1022 | 43396 | 43411 | CCCCAAGACAGAAATC | 4 | 481 |
| 695843 | 1017 | 1032 | N/A | N/A | GCACCAAAAACCCCAA | 16 | 482 |
| 695844 | 1020 | 1035 | N/A | N/A | CATGCACCAAAAACCC | 29 | 483 |
| 695845 | 1023 | 1038 | N/A | N/A | CTGCATGCACCAAAAA | 12 | 484 |
| 695846 | 1024 | 1039 | 43413 | 43428 | ACTGCATGCACCAAAA | 14 | 485 |
| 695847 | 1027 | 1042 | 43416 | 43431 | TCAACTGCATGCACCA | 63 | 486 |
| 695848 | 1029 | 1044 | 43418 | 43433 | AATCAACTGCATGCAC | 14 | 487 |
| 695849 | 1030 | 1045 | 43419 | 43434 | TAATCAACTGCATGCA | 34 | 488 |
| 695850 | 1033 | 1048 | 43422 | 43437 | AAGTAATCAACTGCAT | 8 | 489 |
| 695851 | 1034 | 1049 | 43423 | 43438 | GAAGTAATCAACTGCA | 31 | 490 |
| 695852 | 1035 | 1050 | 43424 | 43439 | AGAAGTAATCAACTGC | 54 | 491 |
| 695853 | 1056 | 1071 | 43445 | 43460 | TCACAATTGGTAAGAA | 34 | 492 |
| 695854 | 1058 | 1073 | 43447 | 43462 | ATTCACAATTGGTAAG | 31 | 493 |
| 695855 | 1060 | 1075 | 43449 | 43464 | ACATTCACAATTGGTA | 13 | 494 |
| 695856 | 1065 | 1080 | 43454 | 43469 | CACCAACATTCACAAT | 32 | 495 |
| 695857 | 1068 | 1083 | 43457 | 43472 | TCACACCAACATTCAC | 20 | 496 |
| 695858 | 1070 | 1085 | 43459 | 43474 | TTTCACACCAACATTC | 10 | 497 |
| 695859 | 1074 | 1089 | 43463 | 43478 | TTTGTTTCACACCAAC | 36 | 498 |
| 695860 | 1076 | 1091 | 43465 | 43480 | AATTTGTTTCACACCA | 43 | 499 |
| 695861 | 1101 | 1116 | 43490 | 43505 | ATAGGGATGATTCAAA | 33 | 500 |
| 695862 | 1103 | 1118 | 43492 | 43507 | GAATAGGGATGATTCA | 6 | 501 |
| 695863 | 1105 | 1120 | 43494 | 43509 | CAGAATAGGGATGATT | 38 | 502 |
| 695864 | 1107 | 1122 | 43496 | 43511 | CACAGAATAGGGATGA | 29 | 503 |
| 695865 | 1121 | 1136 | 43510 | 43525 | GTGACTAGATAAAACA | 19 | 504 |
| 695866 | 1126 | 1141 | 43515 | 43530 | TTTATGTGACTAGATA | 26 | 505 |
| 695867 | 1130 | 1145 | 43519 | 43534 | TCCATTTATGTGACTA | 74 | 506 |
| 695868 | 1151 | 1166 | 43540 | 43555 | TCAACTGAAATTAGTA | 0 | 507 |
| 695869 | 1160 | 1175 | 43549 | 43564 | TAGAAGGTCTCAACTG | 28 | 508 |
| 695870 | 1162 | 1177 | 43551 | 43566 | ATTAGAAGGTCTCAAC | 0 | 509 |
| 695871 | 1164 | 1179 | 43553 | 43568 | CAATTAGAAGGTCTCA | 21 | 510 |
| 695872 | 1168 | 1183 | 43557 | 43572 | AAACCAATTAGAAGGT | 12 | 511 |
| 695873 | 1172 | 1187 | 43561 | 43576 | GTAAAAACCAATTAGA | 37 | 512 |
| 695874 | 1186 | 1201 | 43575 | 43590 | CCCTCAATGTTTCAGT | 10 | 513 |
| 695875 | 1188 | 1203 | 43577 | 43592 | TTCCCTCAATGTTTCA | 35 | 514 |
| 695876 | 1197 | 1212 | 43586 | 43601 | AAATTTGTGTTCCCTC | 39 | 515 |
| 695877 | 1199 | 1214 | 43588 | 43603 | ATAAATTTGTGTTCCC | 48 | 516 |
| 695878 | 1201 | 1216 | 43590 | 43605 | CCATAAATTTGTGTTC | 31 | 517 |
| 695879 | 1205 | 1220 | 43594 | 43609 | AAGCCCATAAATTTGT | 21 | 518 |
| 695880 | 1208 | 1223 | 43597 | 43612 | AGGAAGCCCATAAATT | 28 | 519 |
| 695881 | 1209 | 1224 | 43598 | 43613 | CAGGAAGCCCATAAAT | 37 | 520 |
| 695882 | 1210 | 1225 | 43599 | 43614 | TCAGGAAGCCCATAAA | 26 | 521 |
| 695883 | 1211 | 1226 | 43600 | 43615 | ATCAGGAAGCCCATAA | 55 | 522 |
| 695884 | 1212 | 1227 | 43601 | 43616 | CATCAGGAAGCCCATA | 48 | 523 |
| 695885 | 1214 | 1229 | 43603 | 43618 | ATCATCAGGAAGCCCA | 67 | 524 |
| 695886 | 1215 | 1230 | 43604 | 43619 | CATCATCAGGAAGCCC | 45 | 525 |
| 695887 | 1216 | 1231 | 43605 | 43620 | TCATCATCAGGAAGCC | 52 | 526 |
| 695888 | 1217 | 1232 | 43606 | 43621 | ATCATCATCAGGAAGC | 39 | 527 |
| 695889 | 1219 | 1234 | 43608 | 43623 | GAATCATCATCAGGAA | 50 | 528 |
| 695890 | 1220 | 1235 | 43609 | 43624 | AGAATCATCATCAGGA | 43 | 529 |
| 695891 | 1224 | 1239 | 43613 | 43628 | TAGAAGAATCATCATC | 27 | 530 |
| 695892 | 1226 | 1241 | 43615 | 43630 | CCTAGAAGAATCATCA | 40 | 531 |
| 695893 | 1235 | 1250 | 43624 | 43639 | GACATGATGCCTAGAA | 32 | 532 |
| 695894 | 1237 | 1252 | 43626 | 43641 | AGGACATGATGCCTAG | 4 | 533 |
| 695895 | 1242 | 1257 | 43631 | 43646 | ACTATAGGACATGATG | 27 | 534 |
| 695896 | 1247 | 1262 | 43636 | 43651 | GACAAACTATAGGACA | 14 | 535 |

TABLE 8
Inhibition of K-Ras mRNA by 3-10-3 cEt gapmers targeting
SEQ ID NO: 1 and 2

| | SEQ ID | SEQ ID | SEQ ID | SEQ ID | | | |
|---|---|---|---|---|---|---|---|
| | NO: 1 | NO: 1 | NO: 2 | NO: 2 | | | SEQ |
| ISIS | Start | Stop | Start | Stop | | % | ID |
| NO | Site | Site | Site | Site | Sequence | Inhibition | NO |
| 540806 | 2981 | 2996 | 45370 | 45385 | GCATGAAGATTTCTGG | 51 | 122 |
| 540806 | 2981 | 2996 | 45370 | 45385 | GCATGAAGATTTCTGG | 58 | 122 |
| 651468 | 201 | 216 | 7567 | 7582 | TACCACAAGTTTATAT | 0 | 536 |
| 651472 | 258 | 273 | 7624 | 7639 | ATGATTCTGAATTAGC | 39 | 537 |
| 651478 | 451 | 466 | 25678 | 25693 | CTTCAAATGATTTAGT | 0 | 538 |
| 651479 | 460 | 475 | 25687 | 25702 | GGTGAATATCTTCAAA | 18 | 539 |
| 651483 | 572 | 587 | 27259 | 27274 | TCCTGAGCCTGTTTTG | 97 | 540 |
| 651486 | 651 | 666 | 43040 | 43055 | TGTATAGAAGGCATCA | 0 | 541 |
| 651489 | 738 | 753 | 43127 | 43142 | AATTACACACTTTGTC | 0 | 542 |
| 651495 | 909 | 924 | 43298 | 43313 | AACTTCCACTGTCATT | 7 | 543 |
| 663453 | 184 | 199 | 7550 | 7565 | CAGTCATTTTCAGCAG | 35 | 544 |
| 663455 | 255 | 270 | 7621 | 7636 | ATTCTGAATTAGCTGT | 41 | 545 |
| 663469 | 544 | 559 | 27231 | 27246 | TAGAAGGCAAATCACA | 13 | 546 |
| 663470 | 547 | 562 | 27234 | 27249 | TTCTAGAAGGCAAATC | 7 | 547 |
| 663472 | 553 | 568 | 27240 | 27255 | CTACTGTTCTAGAAGG | 5 | 548 |
| 663479 | 676 | 691 | 43065 | 43080 | TATGTTTTCGAATTTC | 0 | 549 |
| 667550 | 224 | 239 | 7590 | 7605 | TTGCCTACGCCACCAG | 5 | 550 |
| 695767 | 48 | 63 | 2059 | 2074 | CACCTTCGCCGCCGCC | 4 | 551 |
| 695768 | 67 | 82 | 2078 | 2093 | GTACTGGCCGAGCCGC | 0 | 552 |
| 695769 | 91 | 106 | 2102 | 2117 | AGTCCGAAATGGCGGG | 0 | 553 |
| 695770 | 120 | 135 | 2131 | 2146 | CCTTCAGTGCCTGCGC | 23 | 554 |
| 695771 | 123 | 138 | 2134 | 2149 | CCGCCTTCAGTGCCTG | 0 | 555 |
| 695772 | 156 | 171 | 2167 | 2182 | CACCTGGGAGCCGCTG | 0 | 556 |
| 695773 | 167 | 182 | 2178 | 2193 | CCTCTCTCCCGCACCT | 11 | 557 |
| 695774 | 180 | 195 | 7546 | 7561 | CATTTTCAGCAGGCCT | 0 | 558 |
| 695775 | 182 | 197 | 7548 | 7563 | GTCATTTTCAGCAGGC | 22 | 559 |
| 695776 | 232 | 247 | 7598 | 7613 | AGGCACTCTTGCCTAC | 0 | 560 |
| 695777 | 314 | 329 | 25541 | 25556 | ATTACTACTTGCTTCC | 17 | 561 |
| 695778 | 316 | 331 | 25543 | 25558 | CAATTACTACTTGCTT | 0 | 562 |
| 695779 | 318 | 333 | 25545 | 25560 | ATCAATTACTACTTGC | 9 | 563 |
| 695780 | 320 | 335 | 25547 | 25562 | CCATCAATTACTACTT | 4 | 564 |
| 695781 | 339 | 354 | 25566 | 25581 | ATCCAAGAGACAGGTT | 15 | 565 |
| 695782 | 343 | 358 | 25570 | 25585 | GAATATCCAAGAGACA | 6 | 566 |
| 695783 | 363 | 378 | 25590 | 25605 | CTCTTGACCTGCTGTG | 15 | 567 |
| 695784 | 367 | 382 | 25594 | 25609 | ACTCCTCTTGACCTGC | 18 | 568 |
| 695785 | 463 | 478 | 25690 | 25705 | AATGGTGAATATCTTC | 63 | 569 |
| 695786 | 469 | 484 | N/A | N/A | CTCTATAATGGTGAAT | 10 | 570 |
| 695787 | 492 | 507 | 27179 | 27194 | GTCCTTAACTCTTTTA | 0 | 571 |
| 695788 | 498 | 513 | 27185 | 27200 | TTCAGAGTCCTTAACT | 0 | 572 |
| 695789 | 542 | 557 | 27229 | 27244 | GAAGGCAAATCACATT | 16 | 573 |
| 695790 | 555 | 570 | 27242 | 27257 | GTCTACTGTTCTAGAA | 2 | 574 |
| 695791 | 580 | 595 | 27267 | 27282 | TTGCTAAGTCCTGAGC | 86 | 575 |
| 695792 | 583 | 598 | 27270 | 27285 | TTCTTGCTAAGTCCTG | 96 | 576 |
| 695793 | 588 | 603 | 27275 | 27290 | ATAACTTCTTGCTAAG | 18 | 577 |
| 695794 | 590 | 605 | 27277 | 27292 | CCATAACTTCTTGCTA | 48 | 578 |
| 695795 | 597 | 612 | 27284 | 27299 | AGGAATTCCATAACTT | 31 | 579 |
| 695796 | 599 | 614 | 27286 | 27301 | AAAGGAATTCCATAAC | 4 | 580 |
| 695797 | 615 | 630 | 27302 | 27317 | TGCTGATGTTTCAATA | 6 | 581 |
| 695798 | 654 | 669 | 43043 | 43058 | TAATGTATAGAAGGCA | 7 | 582 |
| 695799 | 656 | 671 | 43045 | 43060 | ACTAATGTATAGAAGG | 0 | 583 |
| 695800 | 660 | 675 | 43049 | 43064 | TCGAACTAATGTATAG | 2 | 584 |
| 695801 | 662 | 677 | 43051 | 43066 | TCTCGAACTAATGTAT | 0 | 585 |
| 695802 | 665 | 680 | 43054 | 43069 | ATTTCTCGAACTAATG | 0 | 586 |
| 695803 | 667 | 682 | 43056 | 43071 | GAATTTCTCGAACTAA | 0 | 587 |
| 695804 | 671 | 686 | 43060 | 43075 | TTTCGAATTTCTCGAA | 0 | 588 |
| 695805 | 681 | 696 | 43070 | 43085 | TTCTTTATGTTTTCGA | 7 | 589 |
| 695806 | 734 | 749 | 43123 | 43138 | ACACACTTTGTCTTTG | 8 | 590 |
| 695807 | 779 | 794 | 43168 | 43183 | ACTAGTATGCCTTAAG | 7 | 591 |
| 695808 | 781 | 796 | 43170 | 43185 | GTACTAGTATGCCTTA | 0 | 592 |
| 695809 | 783 | 798 | 43172 | 43187 | TTGTACTAGTATGCCT | 51 | 593 |
| 695810 | 794 | 809 | 43183 | 43198 | AAAATTACCACTTGTA | 1 | 594 |
| 695811 | 799 | 814 | 43188 | 43203 | GTACAAAAATTACCAC | 0 | 595 |
| 695812 | 807 | 822 | 43196 | 43211 | AGTGTAATGTACAAAA | 12 | 596 |
| 695813 | 814 | 829 | 43203 | 43218 | ATAATTTAGTGTAATG | 0 | 597 |
| 695814 | 818 | 833 | 43207 | 43222 | GCTAATAATTTAGTGT | 0 | 598 |
| 695815 | 820 | 835 | 43209 | 43224 | ATGCTAATAATTTAGT | 39 | 599 |
| 695816 | 837 | 852 | 43226 | 43241 | AGGTAATGCTAAAACA | 17 | 600 |
| 695817 | 839 | 854 | 43228 | 43243 | TTAGGTAATGCTAAAA | 0 | 601 |
| 695818 | 841 | 856 | 43230 | 43245 | AATTAGGTAATGCTAA | 0 | 602 |
| 695819 | 862 | 877 | 43251 | 43266 | GTCTGCATGGAGCAGG | 39 | 603 |
| 695820 | 866 | 881 | 43255 | 43270 | AACAGTCTGCATGGAG | 4 | 604 |
| 695821 | 870 | 885 | 43259 | 43274 | AGCTAACAGTCTGCAT | 10 | 605 |
| 695822 | 875 | 890 | 43264 | 43279 | GTAAAAGCTAACAGTC | 0 | 606 |
| 695823 | 877 | 892 | 43266 | 43281 | AGGTAAAAGCTAACAG | 52 | 607 |
| 695824 | 879 | 894 | 43268 | 43283 | TAAGGTAAAAGCTAAC | 4 | 608 |
| 695825 | 884 | 899 | 43273 | 43288 | GCATTTAAGGTAAAAG | 21 | 609 |
| 695826 | 912 | 927 | 43301 | 43316 | AAAAACTTCCACTGTC | 17 | 610 |
| 695827 | 929 | 944 | 43318 | 43333 | TGGCACTTAGAGGAAA | 1 | 611 |
| 695828 | 935 | 950 | 43324 | 43339 | GAATACTGGCACTTAG | 22 | 612 |

TABLE 9
Inhibition of K-Ras mRNA by 3-10-3 cEt gapmers targeting
SEQ ID NO: 1 and 2

| | SEQ ID | SEQ ID | SEQ ID | SEQ ID | | | |
|---|---|---|---|---|---|---|---|
| | NO: 1 | NO: 1 | NO: 2 | NO: 2 | | | SEQ |
| ISIS | Start | Stop | Start | Stop | | % | ID |
| NO | Site | Site | Site | Site | Sequence | Inhibition | NO |
| 540806 | 2981 | 2996 | 45370 | 45385 | GCATGAAGATTTCTGG | 65 | 122 |
| 540806 | 2981 | 2996 | 45370 | 45385 | GCATGAAGATTTCTGG | 66 | 122 |
| 651553 | 1656 | 1671 | 44045 | 44060 | TTCAAAGACTCAAGTT | 27 | 613 |
| 651554 | 1662 | 1677 | 44051 | 44066 | ACTATCTTCAAAGACT | 33 | 614 |
| 651555 | 1686 | 1701 | 44075 | 44090 | TTTAATGTCACAAGCA | 68 | 615 |
| 651565 | 1740 | 1755 | 44129 | 44144 | TTGCAACCTTGGTCTC | 24 | 616 |
| 651568 | 1771 | 1786 | 44160 | 44175 | GAAAGCTCAAAGGTTC | 12 | 617 |
| 651572 | 1822 | 1837 | 44211 | 44226 | GACAACACTGGATGAC | 18 | 618 |
| 651573 | 1828 | 1843 | 44217 | 44232 | ATGCATGACAACACTG | 14 | 619 |
| 651585 | 1911 | 1926 | 44300 | 44315 | TGTCAGCAGGACCACC | 39 | 620 |
| 651587 | 1915 | 1930 | 44304 | 44319 | GATTTGTCAGCAGGAC | 63 | 621 |
| 651593 | 1992 | 2007 | 44381 | 44396 | CTCAACTTTTGAGTTA | 22 | 622 |
| 652004 | 1685 | 1700 | 44074 | 44089 | TTAATGTCACAAGCAG | 63 | 289 |
| 695963 | 1619 | 1634 | 44008 | 44023 | ACTATGAAAGAGCAGT | 2 | 623 |
| 695964 | 1622 | 1637 | 44011 | 44026 | TATACTATGAAAGAGC | 26 | 624 |
| 695965 | 1624 | 1639 | 44013 | 44028 | GTTATACTATGAAAGA | 48 | 625 |
| 695966 | 1633 | 1648 | 44022 | 44037 | AGATTTAAAGTTATAC | 6 | 626 |
| 695967 | 1650 | 1665 | 44039 | 44054 | GACTCAAGTTGAAGAA | 17 | 627 |
| 695968 | 1654 | 1669 | 44043 | 44058 | CAAAGACTCAAGTTGA | 20 | 628 |
| 695969 | 1655 | 1670 | 44044 | 44059 | TCAAAGACTCAAGTTG | 33 | 629 |
| 695970 | 1657 | 1672 | 44046 | 44061 | CTTCAAAGACTCAAGT | 26 | 630 |
| 695971 | 1658 | 1673 | 44047 | 44062 | TCTTCAAAGACTCAAG | 25 | 631 |
| 695972 | 1663 | 1678 | 44052 | 44067 | AACTATCTTCAAAGAC | 9 | 632 |
| 695973 | 1681 | 1696 | 44070 | 44085 | TGTCACAAGCAGAATT | 39 | 633 |
| 695974 | 1682 | 1697 | 44071 | 44086 | ATGTCACAAGCAGAAT | 25 | 634 |
| 695975 | 1683 | 1698 | 44072 | 44087 | AATGTCACAAGCAGAA | 53 | 635 |
| 695976 | 1684 | 1699 | 44073 | 44088 | TAATGTCACAAGCAGA | 61 | 636 |
| 695977 | 1687 | 1702 | 44076 | 44091 | TTTTAATGTCACAAGC | 58 | 637 |
| 695978 | 1688 | 1703 | 44077 | 44092 | CTTTTAATGTCACAAG | 2 | 638 |
| 695979 | 1689 | 1704 | 44078 | 44093 | TCTTTTAATGTCACAA | 38 | 639 |
| 695980 | 1690 | 1705 | 44079 | 44094 | ATCTTTTAATGTCACA | 64 | 640 |
| 695981 | 1691 | 1706 | 44080 | 44095 | AATCTTTTAATGTCAC | 57 | 641 |
| 695982 | 1692 | 1707 | 44081 | 44096 | TAATCTTTTAATGTCA | 0 | 642 |
| 695983 | 1693 | 1708 | 44082 | 44097 | ATAATCTTTTAATGTC | 6 | 643 |
| 695984 | 1716 | 1731 | 44105 | 44120 | CTAATAAGCTATAACT | 16 | 644 |
| 695985 | 1718 | 1733 | 44107 | 44122 | ACCTAATAAGCTATAA | 9 | 645 |
| 695986 | 1720 | 1735 | 44109 | 44124 | ACACCTAATAAGCTAT | 1 | 646 |
| 695987 | 1725 | 1740 | 44114 | 44129 | CTTCAACACCTAATAA | 4 | 647 |
| 695988 | 1727 | 1742 | 44116 | 44131 | CTCTTCAACACCTAAT | 27 | 648 |
| 695989 | 1729 | 1744 | 44118 | 44133 | GTCTCTTCAACACCTA | 52 | 649 |
| 695990 | 1744 | 1759 | 44133 | 44148 | GGCCTTGCAACCTTGG | 36 | 650 |
| 695991 | 1763 | 1778 | 44152 | 44167 | AAAGGTTCACACAGGG | 43 | 651 |
| 695992 | 1765 | 1780 | 44154 | 44169 | TCAAAGGTTCACACAG | 30 | 652 |
| 695993 | 1769 | 1784 | 44158 | 44173 | AAGCTCAAAGGTTCAC | 48 | 653 |
| 695994 | 1773 | 1788 | 44162 | 44177 | ATGAAAGCTCAAAGGT | 18 | 654 |
| 695995 | 1778 | 1793 | 44167 | 44182 | TCTCTATGAAAGCTCA | 60 | 655 |
| 695996 | 1780 | 1795 | 44169 | 44184 | ACTCTCTATGAAAGCT | 30 | 656 |
| 695997 | 1782 | 1797 | 44171 | 44186 | AAACTCTCTATGAAAG | 20 | 657 |
| 695998 | 1790 | 1805 | 44179 | 44194 | ATGCTGTGAAACTCTC | 64 | 658 |
| 695999 | 1792 | 1807 | 44181 | 44196 | CCATGCTGTGAAACTC | 35 | 659 |
| 696000 | 1798 | 1813 | 44187 | 44202 | CACAGTCCATGCTGTG | 17 | 660 |
| 696001 | 1800 | 1815 | 44189 | 44204 | GACACAGTCCATGCTG | 19 | 661 |
| 696002 | 1818 | 1833 | 44207 | 44222 | ACACTGGATGACCGTG | 6 | 662 |
| 696003 | 1820 | 1835 | 44209 | 44224 | CAACACTGGATGACCG | 35 | 663 |
| 696004 | 1830 | 1845 | 44219 | 44234 | CAATGCATGACAACAC | 31 | 664 |
| 696005 | 1832 | 1847 | 44221 | 44236 | ACCAATGCATGACAAC | 38 | 665 |
| 696006 | 1836 | 1851 | 44225 | 44240 | ACTAACCAATGCATGA | 25 | 666 |
| 696007 | 1838 | 1853 | 44227 | 44242 | TGACTAACCAATGCAT | 0 | 667 |
| 696008 | 1843 | 1858 | 44232 | 44247 | CATTTTGACTAACCAA | 7 | 668 |
| 696009 | 1865 | 1880 | 44254 | 44269 | CCAAACTGCCCTAGTC | 18 | 669 |
| 696010 | 1867 | 1882 | 44256 | 44271 | ATCCAAACTGCCCTAG | 19 | 670 |
| 696011 | 1875 | 1890 | 44264 | 44279 | GTTGAGCTATCCAAAC | 10 | 671 |
| 696012 | 1878 | 1893 | 44267 | 44282 | CTTGTTGAGCTATCCA | 74 | 672 |
| 696013 | 1882 | 1897 | 44271 | 44286 | GTATCTTGTTGAGCTA | 73 | 673 |
| 696014 | 1884 | 1899 | 44273 | 44288 | TTGTATCTTGTTGAGC | 52 | 674 |
| 696015 | 1912 | 1927 | 44301 | 44316 | TTGTCAGCAGGACCAC | 39 | 675 |
| 696016 | 1914 | 1929 | 44303 | 44318 | ATTTGTCAGCAGGACC | 56 | 676 |
| 696017 | 1917 | 1932 | 44306 | 44321 | TTGATTTGTCAGCAGG | 74 | 677 |
| 696018 | 1920 | 1935 | 44309 | 44324 | CTCTTGATTTGTCAGC | 67 | 678 |
| 696019 | 1994 | 2009 | 44383 | 44398 | ATCTCAACTTTTGAGT | 17 | 679 |
| 696020 | 2005 | 2020 | 44394 | 44409 | ACCACCCCAAAATCTC | 23 | 680 |
| 696021 | 2021 | 2036 | 44410 | 44425 | AATGTCTTGGCACACC | 46 | 681 |
| 696022 | 2022 | 2037 | 44411 | 44426 | TAATGTCTTGGCACAC | 49 | 682 |
| 696023 | 2023 | 2038 | 44412 | 44427 | TTAATGTCTTGGCACA | 23 | 683 |
| 696024 | 2024 | 2039 | 44413 | 44428 | ATTAATGTCTTGGCAC | 35 | 684 |
| 696025 | 2025 | 2040 | 44414 | 44429 | AATTAATGTCTTGGCA | 25 | 685 |
| 696026 | 2026 | 2041 | 44415 | 44430 | AAATTAATGTCTTGGC | 64 | 686 |
| 696027 | 2067 | 2082 | 44456 | 44471 | CTAGAGATTGTAAAAC | 11 | 687 |
| 696028 | 2069 | 2084 | 44458 | 44473 | ACCTAGAGATTGTAAA | 4 | 688 |

TABLE 10
Inhibition of K-Ras mRNA by 3-10-3 cEt gapmers targeting
SEQ ID NO: 1 and 2

| | SEQ ID | SEQ ID | SEQ ID | SEQ ID | | | |
|---|---|---|---|---|---|---|---|
| | NO: 1 | NO: 1 | NO: 2 | NO: 2 | | | SEQ |
| ISIS | Start | Stop | Start | Stop | | % | ID |
| NO | Site | Site | Site | Site | Sequence | Inhibition | NO |
| 540806 | 2981 | 2996 | 45370 | 45385 | GCATGAAGATTTCTGG | 61 | 122 |
| 540806 | 2981 | 2996 | 45370 | 45385 | GCATGAAGATTTCTGG | 69 | 122 |
| 651597 | 2076 | 2091 | 44465 | 44480 | TAGCCAAACCTAGAGA | 7 | 689 |
| 651599 | 2088 | 2103 | 44477 | 44492 | TGTTAAGAGAACTAGC | 0 | 690 |
| 651600 | 2095 | 2110 | 44484 | 44499 | TAACCAGTGTTAAGAG | 37 | 691 |
| 651603 | 2120 | 2135 | 44509 | 44524 | GAAAAGTGTTTATGCA | 75 | 692 |
| 651610 | 2253 | 2268 | 44642 | 44657 | TCCTAGTCCAGTGATA | 12 | 693 |
| 651613 | 2281 | 2296 | 44670 | 44685 | CACCTATCTAGAACCT | 14 | 694 |
| 651616 | 2302 | 2317 | 44691 | 44706 | CAAAATCAGAGTCCTA | 44 | 695 |
| 651620 | 2418 | 2433 | 44807 | 44822 | CAAATAAGTGTATCCT | 45 | 696 |
| 651621 | 2424 | 2439 | 44813 | 44828 | GCTTGACAAATAAGTG | 24 | 697 |
| 651622 | 2452 | 2467 | 44841 | 44856 | TAGGTTAAAAATTTAC | 14 | 698 |
| 663561 | 2440 | 2455 | 44829 | 44844 | TTACAGATTGTGCTGA | 29 | 699 |
| 696029 | 2071 | 2086 | 44460 | 44475 | AAACCTAGAGATTGTA | 26 | 700 |
| 696030 | 2078 | 2093 | 44467 | 44482 | ACTAGCCAAACCTAGA | 14 | 701 |
| 696031 | 2080 | 2095 | 44469 | 44484 | GAACTAGCCAAACCTA | 17 | 702 |
| 696032 | 2084 | 2099 | 44473 | 44488 | AAGAGAACTAGCCAAA | 33 | 703 |
| 696033 | 2085 | 2100 | 44474 | 44489 | TAAGAGAACTAGCCAA | 21 | 704 |
| 696034 | 2086 | 2101 | 44475 | 44490 | TTAAGAGAACTAGCCA | 26 | 705 |
| 696035 | 2087 | 2102 | 44476 | 44491 | GTTAAGAGAACTAGCC | 22 | 706 |
| 696036 | 2089 | 2104 | 44478 | 44493 | GTGTTAAGAGAACTAG | 39 | 707 |
| 696037 | 2090 | 2105 | 44479 | 44494 | AGTGTTAAGAGAACTA | 0 | 708 |
| 696038 | 2091 | 2106 | 44480 | 44495 | CAGTGTTAAGAGAACT | 17 | 709 |
| 696039 | 2092 | 2107 | 44481 | 44496 | CCAGTGTTAAGAGAAC | 47 | 710 |
| 696040 | 2096 | 2111 | 44485 | 44500 | TTAACCAGTGTTAAGA | 19 | 711 |
| 696041 | 2097 | 2112 | 44486 | 44501 | TTTAACCAGTGTTAAG | 15 | 712 |
| 696042 | 2107 | 2122 | 44496 | 44511 | GCAATGTTAATTTAAC | 0 | 713 |
| 696043 | 2113 | 2128 | 44502 | 44517 | GTTTATGCAATGTTAA | 60 | 714 |
| 696044 | 2115 | 2130 | 44504 | 44519 | GTGTTTATGCAATGTT | 83 | 715 |
| 696045 | 2127 | 2142 | 44516 | 44531 | CAGACTTGAAAAGTGT | 0 | 716 |
| 696046 | 2137 | 2152 | 44526 | 44541 | AAATATGGATCAGACT | 11 | 717 |
| 696047 | 2139 | 2154 | 44528 | 44543 | TTAAATATGGATCAGA | 32 | 718 |
| 696048 | 2141 | 2156 | 44530 | 44545 | TATTAAATATGGATCA | 28 | 719 |
| 696049 | 2178 | 2193 | 44567 | 44582 | TATCAAAAGGATTGTT | 23 | 720 |
| 696050 | 2180 | 2195 | 44569 | 44584 | TTTATCAAAAGGATTG | 9 | 721 |
| 696051 | 2232 | 2247 | 44621 | 44636 | ACCTCACCATGCCATC | 41 | 722 |
| 696052 | 2239 | 2254 | 44628 | 44643 | TACTTTCACCTCACCA | 22 | 723 |
| 696053 | 2241 | 2256 | 44630 | 44645 | GATACTTTCACCTCAC | 36 | 724 |
| 696054 | 2246 | 2261 | 44635 | 44650 | CCAGTGATACTTTCAC | 35 | 725 |
| 696055 | 2249 | 2264 | 44638 | 44653 | AGTCCAGTGATACTTT | 15 | 726 |
| 696056 | 2250 | 2265 | 44639 | 44654 | TAGTCCAGTGATACTT | 22 | 727 |
| 696057 | 2251 | 2266 | 44640 | 44655 | CTAGTCCAGTGATACT | 20 | 728 |
| 696058 | 2254 | 2269 | 44643 | 44658 | TTCCTAGTCCAGTGAT | 12 | 729 |
| 696059 | 2261 | 2276 | 44650 | 44665 | CACCTTCTTCCTAGTC | 30 | 730 |
| 696060 | 2270 | 2285 | 44659 | 44674 | AACCTAAGTCACCTTC | 16 | 731 |
| 696061 | 2272 | 2287 | 44661 | 44676 | AGAACCTAAGTCACCT | 32 | 732 |
| 696062 | 2274 | 2289 | 44663 | 44678 | CTAGAACCTAAGTCAC | 24 | 733 |
| 696063 | 2279 | 2294 | 44668 | 44683 | CCTATCTAGAACCTAA | 21 | 734 |
| 696064 | 2284 | 2299 | 44673 | 44688 | AGACACCTATCTAGAA | 12 | 735 |
| 696065 | 2288 | 2303 | 44677 | 44692 | TAAAAGACACCTATCT | 36 | 736 |
| 696066 | 2290 | 2305 | 44679 | 44694 | CCTAAAAGACACCTAT | 16 | 737 |
| 696067 | 2292 | 2307 | 44681 | 44696 | GTCCTAAAAGACACCT | 18 | 738 |
| 696068 | 2295 | 2310 | 44684 | 44699 | AGAGTCCTAAAAGACA | 21 | 739 |
| 696069 | 2304 | 2319 | 44693 | 44708 | CTCAAAATCAGAGTCC | 38 | 740 |
| 696070 | 2308 | 2323 | 44697 | 44712 | TGTCCTCAAAATCAGA | 29 | 741 |
| 696071 | 2315 | 2330 | 44704 | 44719 | TAAGTGATGTCCTCAA | 38 | 742 |
| 696072 | 2320 | 2335 | 44709 | 44724 | GATAGTAAGTGATGTC | 31 | 743 |
| 696073 | 2325 | 2340 | 44714 | 44729 | AAATGGATAGTAAGTG | 14 | 744 |
| 696074 | 2329 | 2344 | 44718 | 44733 | GAAGAAATGGATAGTA | 52 | 745 |
| 696075 | 2344 | 2359 | 44733 | 44748 | GACTTCTTTTAACATG | 44 | 746 |
| 696076 | 2347 | 2362 | 44736 | 44751 | GATGACTTCTTTTAAC | 20 | 747 |
| 696077 | 2354 | 2369 | 44743 | 44758 | AGTTTGAGATGACTTC | 35 | 748 |
| 696078 | 2356 | 2371 | 44745 | 44760 | AGAGTTTGAGATGACT | 23 | 749 |
| 696079 | 2359 | 2374 | 44748 | 44763 | CTAAGAGTTTGAGATG | 41 | 750 |
| 696080 | 2387 | 2402 | 44776 | 44791 | TAAATTACATAGTTGT | 12 | 751 |
| 696081 | 2407 | 2422 | 44796 | 44811 | ATCCTTATGTAAATGG | 2 | 752 |
| 696082 | 2409 | 2424 | 44798 | 44813 | GTATCCTTATGTAAAT | 27 | 753 |
| 696083 | 2411 | 2426 | 44800 | 44815 | GTGTATCCTTATGTAA | 50 | 754 |
| 696084 | 2416 | 2431 | 44805 | 44820 | AATAAGTGTATCCTTA | 12 | 755 |
| 696085 | 2420 | 2435 | 44809 | 44824 | GACAAATAAGTGTATC | 52 | 756 |
| 696086 | 2425 | 2440 | 44814 | 44829 | AGCTTGACAAATAAGT | 31 | 757 |
| 696087 | 2426 | 2441 | 44815 | 44830 | GAGCTTGACAAATAAG | 21 | 758 |
| 696088 | 2429 | 2444 | 44818 | 44833 | GCTGAGCTTGACAAAT | 22 | 759 |
| 696089 | 2430 | 2445 | 44819 | 44834 | TGCTGAGCTTGACAAA | 27 | 760 |
| 696090 | 2435 | 2450 | 44824 | 44839 | GATTGTGCTGAGCTTG | 68 | 761 |
| 696091 | 2436 | 2451 | 44825 | 44840 | AGATTGTGCTGAGCTT | 59 | 762 |
| 696092 | 2438 | 2453 | 44827 | 44842 | ACAGATTGTGCTGAGC | 48 | 763 |
| 696093 | 2439 | 2454 | 44828 | 44843 | TACAGATTGTGCTGAG | 42 | 764 |
| 696094 | 2443 | 2458 | 44832 | 44847 | AATTTACAGATTGTGC | 22 | 765 |

### Example 4: Antisense Inhibition of Human K-Ras in A431 Cells by cEt Gapmers

[0354] Antisense oligonucleotides were designed targeting a K-Ras nucleic acid and were tested for their effects on K-Ras mRNA in vitro. Cultured A431 cells at a density of 5,000 cells per well were with 1,000 nM antisense oligonucleotide by free uptake. After a treatment period of approximately 24 hours, RNA was isolated from the cells and K-Ras mRNA levels were measured by quantitative real-time PCR. Human primer probe set RTS132 (forward sequence CAAGTAGTAATTGATGGAGAAACCTGTCT, designated herein as SEQ ID NO: 10; reverse sequence CTGGTCCCTCATTGCACTGTAC; designated herein as SEQ ID NO: 11; probe sequence TGGATATTCTCGACACAGCAGGTCAAGAGG, designated herein as SEQ ID NO: 12) was used to measure mRNA levels. K-Ras mRNA levels were adjusted according to total RNA content, as measured by RIBOGREEN®. Results are presented as percent inhibition of K-Ras, relative to untreated control cells. As used herein, a value of ‘0’ indicates that treatment with the antisense oligonucleotide did not inhibit mRNA levels.

[0355] The newly designed chimeric antisense oligonucleotides in the Table below were designed as 3-10-3 cEt gapmers. The gapmers are 16 nucleosides in length, wherein the central gap segment comprises of ten 2′-deoxynucleosides and is flanked by wing segments on the 5′ direction and the 3′ direction comprising three nucleosides each. Each nucleoside in the 5′ wing segment and each nucleoside in the 3′ wing segment has a cEt sugar modification. The internucleoside linkages throughout each gapmer are phosphorothioate (P═S) linkages. All cytosine residues throughout each gapmer are 5-methylcytosines. “Start site” indicates the 5′-most nucleoside to which the gapmer is targeted in the human gene sequence. “Stop site” indicates the 3′-most nucleoside to which the gapmer is targeted human gene sequence. Each gapmer listed in the Table below is targeted to either SEQ ID NO: 1 or SEQ ID NO: 2. ‘N/A’ indicates that the antisense oligonucleotide does not target that particular gene sequence with 100% complementarity.

TABLE 11
Inhibition of K-Ras mRNA by 3-10-3 cEt gapmers targeting
SEQ ID NO: 1 and 2

| | SEQ ID | SEQ ID | SEQ ID | SEQ ID | | | |
|---|---|---|---|---|---|---|---|
| | NO: 1 | NO: 1 | NO: 2 | NO: 2 | | | SEQ |
| ISIS | Start | Stop | Start | Stop | | % | ID |
| NO | Site | Site | Site | Site | Sequence | Inhibition | NO |
| 540806 | 2981 | 2996 | 45370 | 45385 | GCATGAAGATTTCTGG | 50 | 122 |
| 540806 | 2981 | 2996 | 45370 | 45385 | GCATGAAGATTTCTGG | 53 | 122 |
| 651468 | 201 | 216 | 7567 | 7582 | TACCACAAGTTTATAT | 11 | 536 |
| 651472 | 258 | 273 | 7624 | 7639 | ATGATTCTGAATTAGC | 13 | 537 |
| 651478 | 451 | 466 | 25678 | 25693 | CTTCAAATGATTTAGT | 24 | 538 |
| 651479 | 460 | 475 | 25687 | 25702 | GGTGAATATCTTCAAA | 47 | 539 |
| 651483 | 572 | 587 | 27259 | 27274 | TCCTGAGCCTGTTTTG | 44 | 540 |
| 651486 | 651 | 666 | 43040 | 43055 | TGTATAGAAGGCATCA | 0 | 541 |
| 651489 | 738 | 753 | 43127 | 43142 | AATTACACACTTTGTC | 0 | 542 |
| 651495 | 909 | 924 | 43298 | 43313 | AACTTCCACTGTCATT | 14 | 543 |
| 663453 | 184 | 199 | 7550 | 7565 | CAGTCATTTTCAGCAG | 0 | 544 |
| 663455 | 255 | 270 | 7621 | 7636 | ATTCTGAATTAGCTGT | 31 | 545 |
| 663469 | 544 | 559 | 27231 | 27246 | TAGAAGGCAAATCACA | 18 | 546 |
| 663470 | 547 | 562 | 27234 | 27249 | TTCTAGAAGGCAAATC | 3 | 547 |
| 663472 | 553 | 568 | 27240 | 27255 | CTACTGTTCTAGAAGG | 16 | 548 |
| 663479 | 676 | 691 | 43065 | 43080 | TATGTTTTCGAATTTC | 0 | 549 |
| 667550 | 224 | 239 | 7590 | 7605 | TTGCCTACGCCACCAG | 0 | 550 |
| 695767 | 48 | 63 | 2059 | 2074 | CACCTTCGCCGCCGCC | 0 | 551 |
| 695768 | 67 | 82 | 2078 | 2093 | GTACTGGCCGAGCCGC | 5 | 552 |
| 695769 | 91 | 106 | 2102 | 2117 | AGTCCGAAATGGCGGG | 0 | 553 |
| 695770 | 120 | 135 | 2131 | 2146 | CCTTCAGTGCCTGCGC | 45 | 554 |
| 695771 | 123 | 138 | 2134 | 2149 | CCGCCTTCAGTGCCTG | 0 | 555 |
| 695772 | 156 | 171 | 2167 | 2182 | CACCTGGGAGCCGCTG | 0 | 556 |
| 695773 | 167 | 182 | 2178 | 2193 | CCTCTCTCCCGCACCT | 0 | 557 |
| 695774 | 180 | 195 | 7546 | 7561 | CATTTTCAGCAGGCCT | 0 | 558 |
| 695775 | 182 | 197 | 7548 | 7563 | GTCATTTTCAGCAGGC | 0 | 559 |
| 695776 | 232 | 247 | 7598 | 7613 | AGGCACTCTTGCCTAC | 0 | 560 |
| 695777 | 314 | 329 | 25541 | 25556 | ATTACTACTTGCTTCC | 0 | 561 |
| 695778 | 316 | 331 | 25543 | 25558 | CAATTACTACTTGCTT | 5 | 562 |
| 695779 | 318 | 333 | 25545 | 25560 | ATCAATTACTACTTGC | 13 | 563 |
| 695780 | 320 | 335 | 25547 | 25562 | CCATCAATTACTACTT | 17 | 564 |
| 695781 | 339 | 354 | 25566 | 25581 | ATCCAAGAGACAGGTT | 70 | 565 |
| 695782 | 343 | 358 | 25570 | 25585 | GAATATCCAAGAGACA | 52 | 566 |
| 695783 | 363 | 378 | 25590 | 25605 | CTCTTGACCTGCTGTG | 80 | 567 |
| 695784 | 367 | 382 | 25594 | 25609 | ACTCCTCTTGACCTGC | 96 | 568 |
| 695785 | 463 | 478 | 25690 | 25705 | AATGGTGAATATCTTC | 54 | 569 |
| 695786 | 469 | 484 | N/A | N/A | CTCTATAATGGTGAAT | 3 | 570 |
| 695787 | 492 | 507 | 27179 | 27194 | GTCCTTAACTCTTTTA | 6 | 571 |
| 695788 | 498 | 513 | 27185 | 27200 | TTCAGAGTCCTTAACT | 0 | 572 |
| 695789 | 542 | 557 | 27229 | 27244 | GAAGGCAAATCACATT | 18 | 573 |
| 695790 | 555 | 570 | 27242 | 27257 | GTCTACTGTTCTAGAA | 0 | 574 |
| 695791 | 580 | 595 | 27267 | 27282 | TTGCTAAGTCCTGAGC | 0 | 575 |
| 695792 | 583 | 598 | 27270 | 27285 | TTCTTGCTAAGTCCTG | 46 | 576 |
| 695793 | 588 | 603 | 27275 | 27290 | ATAACTTCTTGCTAAG | 20 | 577 |
| 695794 | 590 | 605 | 27277 | 27292 | CCATAACTTCTTGCTA | 0 | 578 |
| 695795 | 597 | 612 | 27284 | 27299 | AGGAATTCCATAACTT | 6 | 579 |
| 695796 | 599 | 614 | 27286 | 27301 | AAAGGAATTCCATAAC | 1 | 580 |
| 695797 | 615 | 630 | 27302 | 27317 | TGCTGATGTTTCAATA | 0 | 581 |
| 695798 | 654 | 669 | 43043 | 43058 | TAATGTATAGAAGGCA | 0 | 582 |
| 695799 | 656 | 671 | 43045 | 43060 | ACTAATGTATAGAAGG | 10 | 583 |
| 695800 | 660 | 675 | 43049 | 43064 | TCGAACTAATGTATAG | 0 | 584 |
| 695801 | 662 | 677 | 43051 | 43066 | TCTCGAACTAATGTAT | 0 | 585 |
| 695802 | 665 | 680 | 43054 | 43069 | ATTTCTCGAACTAATG | 0 | 586 |
| 695803 | 667 | 682 | 43056 | 43071 | GAATTTCTCGAACTAA | 4 | 587 |
| 695804 | 671 | 686 | 43060 | 43075 | TTTCGAATTTCTCGAA | 0 | 588 |
| 695805 | 681 | 696 | 43070 | 43085 | TTCTTTATGTTTTCGA | 0 | 589 |
| 695806 | 734 | 749 | 43123 | 43138 | ACACACTTTGTCTTTG | 8 | 590 |
| 695807 | 779 | 794 | 43168 | 43183 | ACTAGTATGCCTTAAG | 3 | 591 |
| 695808 | 781 | 796 | 43170 | 43185 | GTACTAGTATGCCTTA | 0 | 592 |
| 695809 | 783 | 798 | 43172 | 43187 | TTGTACTAGTATGCCT | 43 | 593 |
| 695810 | 794 | 809 | 43183 | 43198 | AAAATTACCACTTGTA | 2 | 594 |
| 695811 | 799 | 814 | 43188 | 43203 | GTACAAAAATTACCAC | 0 | 595 |
| 695812 | 807 | 822 | 43196 | 43211 | AGTGTAATGTACAAAA | 0 | 596 |
| 695813 | 814 | 829 | 43203 | 43218 | ATAATTTAGTGTAATG | 0 | 597 |
| 695814 | 818 | 833 | 43207 | 43222 | GCTAATAATTTAGTGT | 0 | 598 |
| 695815 | 820 | 835 | 43209 | 43224 | ATGCTAATAATTTAGT | 0 | 599 |
| 695816 | 837 | 852 | 43226 | 43241 | AGGTAATGCTAAAACA | 12 | 600 |
| 695817 | 839 | 854 | 43228 | 43243 | TTAGGTAATGCTAAAA | 0 | 601 |
| 695818 | 841 | 856 | 43230 | 43245 | AATTAGGTAATGCTAA | 0 | 602 |
| 695819 | 862 | 877 | 43251 | 43266 | GTCTGCATGGAGCAGG | 2 | 603 |
| 695820 | 866 | 881 | 43255 | 43270 | AACAGTCTGCATGGAG | 9 | 604 |
| 695821 | 870 | 885 | 43259 | 43274 | AGCTAACAGTCTGCAT | 0 | 605 |
| 695822 | 875 | 890 | 43264 | 43279 | GTAAAAGCTAACAGTC | 45 | 606 |
| 695823 | 877 | 892 | 43266 | 43281 | AGGTAAAAGCTAACAG | 52 | 607 |
| 695824 | 879 | 894 | 43268 | 43283 | TAAGGTAAAAGCTAAC | 0 | 608 |
| 695825 | 884 | 899 | 43273 | 43288 | GCATTTAAGGTAAAAG | 10 | 609 |
| 695826 | 912 | 927 | 43301 | 43316 | AAAAACTTCCACTGTC | 14 | 610 |
| 695827 | 929 | 944 | 43318 | 43333 | TGGCACTTAGAGGAAA | 19 | 611 |
| 695828 | 935 | 950 | 43324 | 43339 | GAATACTGGCACTTAG | 13 | 612 |

### Example 5: Antisense Inhibition of Human K-Ras in A431 Cells by cEt Gapmers

[0356] Antisense oligonucleotides were designed targeting a K-Ras nucleic acid and were tested for their effects on K-Ras mRNA in vitro. The antisense oligonucleotides were tested in a series of experiments that had similar culture conditions. The results for each experiment are presented in separate tables shown below. Cultured A431cells at a density of 5,000 cells per well were treated with 2,000 nM antisense oligonucleotide by free uptake. After a treatment period of approximately 24 hours, RNA was isolated from the cells and K-Ras mRNA levels were measured by quantitative real-time PCR. Human primer probe set RTS3496_MGB was used to measure mRNA levels. K-Ras mRNA levels were adjusted according to total RNA content, as measured by RIBOGREEN®. Results are presented as percent inhibition of K-Ras, relative to untreated control cells. As used herein, a value of ‘0’ indicates that treatment with the antisense oligonucleotide did not inhibit mRNA levels.

[0357] The newly designed chimeric antisense oligonucleotides in the Tables below were designed as 3-10-3 cEt gapmers. The gapmers are 16 nucleosides in length, wherein the central gap segment comprises of ten 2′-deoxynucleosides and is flanked by wing segments on the 5′ direction and the 3′ direction comprising three nucleosides each. Each nucleoside in the 5′ wing segment and each nucleoside in the 3′ wing segment has a cEt sugar modification. The internucleoside linkages throughout each gapmer are phosphorothioate (P═S) linkages. All cytosine residues throughout each gapmer are 5-methylcytosines. “Start site” indicates the 5′-most nucleoside to which the gapmer is targeted in the human gene sequence. “Stop site” indicates the 3′-most nucleoside to which the gapmer is targeted human gene sequence. Each gapmer listed in the Tables below is targeted to either SEQ ID NO: 1 or SEQ ID NO: 2. ‘N/A’ indicates that the antisense oligonucleotide does not target that particular gene sequence with 100% complementarity.

TABLE 12
Inhibition of K-Ras mRNA by 3-10-3 cEt gapmers
targeting SEQ ID NO: 1 and 2

| | SEQ ID | SEQ ID | SEQ ID | SEQ ID | | | |
|---|---|---|---|---|---|---|---|
| | NO: 1 | NO: 1 | NO: 2 | NO: 2 | | | SEQ |
| ISIS | Start | Stop | Start | Stop | | % | ID |
| NO | Site | Site | Site | Site | Sequence | Inhibition | NO |
| 540733 | 830 | 845 | 43219 | 43234 | GCTAAAACAAATGCTA | 33 | 15 |
| 540747 | 466 | 481 | 25693 | 25708 | TATAATGGTGAATATC | 7 | 19 |
| 540806 | 2981 | 2996 | 45370 | 45385 | GCATGAAGATTTCTGG | 62 | 122 |
| 651479 | 460 | 475 | 25687 | 25702 | GGTGAATATCTTCAAA | 28 | 539 |
| 651490 | 786 | 801 | 43175 | 43190 | CACTTGTACTAGTATG | 36 | 167 |
| 651499 | 965 | 980 | 43354 | 43369 | GCATTGCTAGTTCAAA | 46 | 461 |
| 651502 | 1026 | 1041 | 43415 | 43430 | CAACTGCATGCACCAA | 31 | 463 |
| 651529 | 1311 | 1326 | 43700 | 43715 | ACTAATAGCAGTGGAA | 27 | 238 |
| 651530 | 1313 | 1328 | 43702 | 43717 | TGACTAATAGCAGTGG | 58 | 239 |
| 651540 | 1443 | 1458 | 43832 | 43847 | TTAGGAGTCTTTATAG | 30 | 387 |
| 651541 | 1449 | 1464 | 43838 | 43853 | AAGCTATTAGGAGTCT | 65 | 388 |
| 651953 | 967 | 982 | 43356 | 43371 | AGGCATTGCTAGTTCA | 55 | 207 |
| 651959 | 1028 | 1043 | 43417 | 43432 | ATCAACTGCATGCACC | 42 | 213 |
| 651966 | 1128 | 1143 | 43517 | 43532 | CATTTATGTGACTAGA | 56 | 220 |
| 651967 | 1138 | 1153 | 43527 | 43542 | GTAATTAATCCATTTA | 15 | 221 |
| 651987 | 1447 | 1462 | 43836 | 43851 | GCTATTAGGAGTCTTT | 76 | 272 |
| 663467 | 461 | 476 | 25688 | 25703 | TGGTGAATATCTTCAA | 9 | 766 |
| 663485 | 819 | 834 | 43208 | 43223 | TGCTAATAATTTAGTG | 6 | 767 |
| 663486 | 823 | 838 | 43212 | 43227 | CAAATGCTAATAATTT | 0 | 768 |
| 695785 | 463 | 478 | 25690 | 25705 | AATGGTGAATATCTTC | 50 | 569 |
| 695808 | 781 | 796 | 43170 | 43185 | GTACTAGTATGCCTTA | 50 | 592 |
| 695809 | 783 | 798 | 43172 | 43187 | TTGTACTAGTATGCCT | 55 | 593 |
| 695814 | 818 | 833 | 43207 | 43222 | GCTAATAATTTAGTGT | 18 | 598 |
| 695815 | 820 | 835 | 43209 | 43224 | ATGCTAATAATTTAGT | 11 | 599 |
| 695822 | 875 | 890 | 43264 | 43279 | GTAAAAGCTAACAGTC | 21 | 606 |
| 695823 | 877 | 892 | 43266 | 43281 | AGGTAAAAGCTAACAG | 41 | 607 |
| 695824 | 879 | 894 | 43268 | 43283 | TAAGGTAAAAGCTAAC | 20 | 608 |
| 695835 | 964 | 979 | 43353 | 43368 | CATTGCTAGTTCAAAA | 9 | 474 |
| 695836 | 966 | 981 | 43355 | 43370 | GGCATTGCTAGTTCAA | 43 | 475 |
| 695847 | 1027 | 1042 | 43416 | 43431 | TCAACTGCATGCACCA | 52 | 486 |
| 695867 | 1130 | 1145 | 43519 | 43534 | TCCATTTATGTGACTA | 68 | 506 |
| 695912 | 1312 | 1327 | 43701 | 43716 | GACTAATAGCAGTGGA | 62 | 408 |
| 695913 | 1314 | 1329 | 43703 | 43718 | ATGACTAATAGCAGTG | 49 | 409 |
| 695916 | 1391 | 1406 | 43780 | 43795 | TAGTTTCCATTGCCTT | 16 | 412 |
| 695917 | 1393 | 1408 | 43782 | 43797 | AATAGTTTCCATTGCC | 56 | 413 |
| 695918 | 1395 | 1410 | 43784 | 43799 | ATAATAGTTTCCATTG | 8 | 414 |
| 695923 | 1440 | 1455 | 43829 | 43844 | GGAGTCTTTATAGTAA | 38 | 419 |
| 695924 | 1441 | 1456 | 43830 | 43845 | AGGAGTCTTTATAGTA | 66 | 420 |
| 695925 | 1442 | 1457 | 43831 | 43846 | TAGGAGTCTTTATAGT | 41 | 421 |
| 695926 | 1444 | 1459 | 43833 | 43848 | ATTAGGAGTCTTTATA | 20 | 422 |
| 695927 | 1445 | 1460 | 43834 | 43849 | TATTAGGAGTCTTTAT | 13 | 423 |
| 695928 | 1446 | 1461 | 43835 | 43850 | CTATTAGGAGTCTTTA | 34 | 424 |
| 695929 | 1448 | 1463 | 43837 | 43852 | AGCTATTAGGAGTCTT | 35 | 425 |
| 695930 | 1450 | 1465 | 43839 | 43854 | AAAGCTATTAGGAGTC | 65 | 426 |
| 695931 | 1451 | 1466 | 43840 | 43855 | AAAAGCTATTAGGAGT | 25 | 427 |
| 696286 | 3841 | 3856 | 46230 | 46245 | GTTTCACATAGCAATT | 29 | 769 |
| 696287 | 3844 | 3859 | 46233 | 46248 | GTAGTTTCACATAGCA | 46 | 770 |
| 696288 | 3846 | 3861 | 46235 | 46250 | CTGTAGTTTCACATAG | 25 | 771 |
| 716582 | 459 | 474 | 25686 | 25701 | GTGAATATCTTCAAAT | 0 | 772 |
| 716583 | 462 | 477 | 25689 | 25704 | ATGGTGAATATCTTCA | 64 | 773 |
| 716584 | 464 | 479 | 25691 | 25706 | TAATGGTGAATATCTT | 11 | 774 |
| 716585 | 465 | 480 | 25692 | 25707 | ATAATGGTGAATATCT | 41 | 775 |
| 716586 | 780 | 795 | 43169 | 43184 | TACTAGTATGCCTTAA | 16 | 776 |
| 716587 | 782 | 797 | 43171 | 43186 | TGTACTAGTATGCCTT | 66 | 777 |
| 716588 | 784 | 799 | 43173 | 43188 | CTTGTACTAGTATGCC | 59 | 778 |
| 716589 | 785 | 800 | 43174 | 43189 | ACTTGTACTAGTATGC | 51 | 779 |
| 716590 | 821 | 836 | 43210 | 43225 | AATGCTAATAATTTAG | 0 | 780 |
| 716591 | 822 | 837 | 43211 | 43226 | AAATGCTAATAATTTA | 13 | 781 |
| 716592 | 824 | 839 | 43213 | 43228 | ACAAATGCTAATAATT | 1 | 782 |
| 716593 | 825 | 840 | 43214 | 43229 | AACAAATGCTAATAAT | 0 | 783 |
| 716594 | 826 | 841 | 43215 | 43230 | AAACAAATGCTAATAA | 9 | 784 |
| 716595 | 827 | 842 | 43216 | 43231 | AAAACAAATGCTAATA | 12 | 785 |
| 716596 | 828 | 843 | 43217 | 43232 | TAAAACAAATGCTAAT | 5 | 786 |
| 716597 | 829 | 844 | 43218 | 43233 | CTAAAACAAATGCTAA | 15 | 787 |
| 716598 | 876 | 891 | 43265 | 43280 | GGTAAAAGCTAACAGT | 49 | 788 |
| 716599 | 878 | 893 | 43267 | 43282 | AAGGTAAAAGCTAACA | 21 | 789 |
| 716600 | 1129 | 1144 | 43518 | 43533 | CCATTTATGTGACTAG | 75 | 790 |
| 716601 | 1131 | 1146 | 43520 | 43535 | ATCCATTTATGTGACT | 38 | 791 |
| 716602 | 1132 | 1147 | 43521 | 43536 | AATCCATTTATGTGAC | 26 | 792 |
| 716603 | 1133 | 1148 | 43522 | 43537 | TAATCCATTTATGTGA | 31 | 793 |
| 716604 | 1134 | 1149 | 43523 | 43538 | TTAATCCATTTATGTG | 34 | 794 |
| 716605 | 1135 | 1150 | 43524 | 43539 | ATTAATCCATTTATGT | 3 | 795 |
| 716606 | 1136 | 1151 | 43525 | 43540 | AATTAATCCATTTATG | 16 | 796 |
| 716607 | 1137 | 1152 | 43526 | 43541 | TAATTAATCCATTTAT | 0 | 797 |
| 716608 | 1392 | 1407 | 43781 | 43796 | ATAGTTTCCATTGCCT | 65 | 798 |
| 716609 | 1394 | 1409 | 43783 | 43798 | TAATAGTTTCCATTGC | 53 | 799 |
| 716610 | 3842 | 3857 | 46231 | 46246 | AGTTTCACATAGCAAT | 38 | 800 |
| 716611 | 3843 | 3858 | 46232 | 46247 | TAGTTTCACATAGCAA | 51 | 801 |
| 716612 | 3845 | 3860 | 46234 | 46249 | TGTAGTTTCACATAGC | 59 | 802 |

TABLE 13
Inhibition of K-Ras mRNA by 3-10-3 cEt gapmers
targeting SEQ ID NO: 1 and 2

| | SEQ ID | SEQ ID | SEQ ID | SEQ ID | | | |
|---|---|---|---|---|---|---|---|
| | NO: 1 | NO: 1 | NO: 2 | NO: 2 | | | SEQ |
| ISIS | Start | Stop | Start | Stop | | % | ID |
| NO | Site | Site | Site | Site | Sequence | Inhibition | NO |
| 540770 | 1488 | 1503 | 43877 | 43892 | AATAATCCCCATTTCA | 16 | 104 |
| 540772 | 1520 | 1535 | 43909 | 43924 | GCATGTAAATATAGCC | 11 | 105 |
| 540806 | 2981 | 2996 | 45370 | 45385 | GCATGAAGATTTCTGG | 60 | 122 |
| 651544 | 1494 | 1509 | 43883 | 43898 | TGCTATAATAATCCCC | 43 | 389 |
| 651555 | 1686 | 1701 | 44075 | 44090 | TTTAATGTCACAAGCA | 57 | 615 |
| 651569 | 1789 | 1804 | 44178 | 44193 | TGCTGTGAAACTCTCT | 27 | 803 |
| 651587 | 1915 | 1930 | 44304 | 44319 | GATTTGTCAGCAGGAC | 47 | 621 |
| 651588 | 1919 | 1934 | 44308 | 44323 | TCTTGATTTGTCAGCA | 62 | 804 |
| 651589 | 1921 | 1936 | 44310 | 44325 | GCTCTTGATTTGTCAG | 23 | 262 |
| 651990 | 1493 | 1508 | 43882 | 43897 | GCTATAATAATCCCCA | 56 | 275 |
| 652004 | 1685 | 1700 | 44074 | 44089 | TTAATGTCACAAGCAG | 52 | 289 |
| 652010 | 1776 | 1791 | 44165 | 44180 | TCTATGAAAGCTCAAA | 18 | 295 |
| 652011 | 1785 | 1800 | 44174 | 44189 | GTGAAACTCTCTATGA | 28 | 296 |
| 652018 | 1880 | 1895 | 44269 | 44284 | ATCTTGTTGAGCTATC | 40 | 303 |
| 652019 | 1918 | 1933 | 44307 | 44322 | CTTGATTTGTCAGCAG | 44 | 304 |
| 652023 | 2047 | 2062 | 44436 | 44451 | TCACTTCATTGTTTAA | 32 | 329 |
| 695867 | 1130 | 1145 | 43519 | 43534 | TCCATTTATGTGACTA | 63 | 506 |
| 695939 | 1492 | 1507 | 43881 | 43896 | CTATAATAATCCCCAT | 6 | 435 |
| 695940 | 1495 | 1510 | 43884 | 43899 | TTGCTATAATAATCCC | 39 | 436 |
| 695948 | 1516 | 1531 | 43905 | 43920 | GTAAATATAGCCCCAA | 29 | 444 |
| 695949 | 1518 | 1533 | 43907 | 43922 | ATGTAAATATAGCCCC | 28 | 445 |
| 695975 | 1683 | 1698 | 44072 | 44087 | AATGTCACAAGCAGAA | 49 | 635 |
| 695976 | 1684 | 1699 | 44073 | 44088 | TAATGTCACAAGCAGA | 52 | 636 |
| 695977 | 1687 | 1702 | 44076 | 44091 | TTTTAATGTCACAAGC | 52 | 637 |
| 695978 | 1688 | 1703 | 44077 | 44092 | CTTTTAATGTCACAAG | 9 | 638 |
| 695979 | 1689 | 1704 | 44078 | 44093 | TCTTTTAATGTCACAA | 46 | 639 |
| 695980 | 1690 | 1705 | 44079 | 44094 | ATCTTTTAATGTCACA | 58 | 640 |
| 695981 | 1691 | 1706 | 44080 | 44095 | AATCTTTTAATGTCAC | 44 | 641 |
| 695982 | 1692 | 1707 | 44081 | 44096 | TAATCTTTTAATGTCA | 7 | 642 |
| 695995 | 1778 | 1793 | 44167 | 44182 | TCTCTATGAAAGCTCA | 50 | 655 |
| 695996 | 1780 | 1795 | 44169 | 44184 | ACTCTCTATGAAAGCT | 29 | 656 |
| 695998 | 1790 | 1805 | 44179 | 44194 | ATGCTGTGAAACTCTC | 58 | 658 |
| 695999 | 1792 | 1807 | 44181 | 44196 | CCATGCTGTGAAACTC | 26 | 659 |
| 696011 | 1875 | 1890 | 44264 | 44279 | GTTGAGCTATCCAAAC | 2 | 671 |
| 696012 | 1878 | 1893 | 44267 | 44282 | CTTGTTGAGCTATCCA | 63 | 672 |
| 696013 | 1882 | 1897 | 44271 | 44286 | GTATCTTGTTGAGCTA | 56 | 673 |
| 696014 | 1884 | 1899 | 44273 | 44288 | TTGTATCTTGTTGAGC | 50 | 674 |
| 696016 | 1914 | 1929 | 44303 | 44318 | ATTTGTCAGCAGGACC | 35 | 676 |
| 696017 | 1917 | 1932 | 44306 | 44321 | TTGATTTGTCAGCAGG | 65 | 677 |
| 696018 | 1920 | 1935 | 44309 | 44324 | CTCTTGATTTGTCAGC | 53 | 678 |
| 696025 | 2025 | 2040 | 44414 | 44429 | AATTAATGTCTTGGCA | 12 | 685 |
| 696026 | 2026 | 2041 | 44415 | 44430 | AAATTAATGTCTTGGC | 47 | 686 |
| 696816 | 1519 | 1534 | 43908 | 43923 | CATGTAAATATAGCCC | 5 | 805 |
| 716613 | 1489 | 1504 | 43878 | 43893 | TAATAATCCCCATTTC | 9 | 806 |
| 716614 | 1490 | 1505 | 43879 | 43894 | ATAATAATCCCCATTT | 4 | 807 |
| 716615 | 1491 | 1506 | 43880 | 43895 | TATAATAATCCCCATT | 7 | 808 |
| 716616 | 1517 | 1532 | 43906 | 43921 | TGTAAATATAGCCCCA | 34 | 809 |
| 716617 | 1777 | 1792 | 44166 | 44181 | CTCTATGAAAGCTCAA | 39 | 810 |
| 716618 | 1779 | 1794 | 44168 | 44183 | CTCTCTATGAAAGCTC | 29 | 811 |
| 716619 | 1786 | 1801 | 44175 | 44190 | TGTGAAACTCTCTATG | 4 | 812 |
| 716620 | 1787 | 1802 | 44176 | 44191 | CTGTGAAACTCTCTAT | 29 | 813 |
| 716621 | 1788 | 1803 | 44177 | 44192 | GCTGTGAAACTCTCTA | 42 | 814 |
| 716622 | 1791 | 1806 | 44180 | 44195 | CATGCTGTGAAACTCT | 8 | 815 |
| 716623 | 1876 | 1891 | 44265 | 44280 | TGTTGAGCTATCCAAA | 37 | 816 |
| 716624 | 1877 | 1892 | 44266 | 44281 | TTGTTGAGCTATCCAA | 3 | 817 |
| 716625 | 1879 | 1894 | 44268 | 44283 | TCTTGTTGAGCTATCC | 56 | 818 |
| 716626 | 1881 | 1896 | 44270 | 44285 | TATCTTGTTGAGCTAT | 33 | 819 |
| 716627 | 1883 | 1898 | 44272 | 44287 | TGTATCTTGTTGAGCT | 31 | 820 |
| 716628 | 1916 | 1931 | 44305 | 44320 | TGATTTGTCAGCAGGA | 59 | 821 |
| 716629 | 2027 | 2042 | 44416 | 44431 | AAAATTAATGTCTTGG | 12 | 822 |
| 716630 | 2028 | 2043 | 44417 | 44432 | AAAAATTAATGTCTTG | 20 | 823 |
| 716631 | 2029 | 2044 | 44418 | 44433 | AAAAAATTAATGTCTT | 9 | 824 |
| 716632 | 2030 | 2045 | 44419 | 44434 | AAAAAAATTAATGTCT | 7 | 825 |
| 716633 | 2031 | 2046 | 44420 | 44435 | AAAAAAAATTAATGTC | 14 | 826 |
| 716634 | 2032 | 2047 | 44421 | 44436 | AAAAAAAAATTAATGT | 16 | 827 |
| 716635 | 2033 | 2048 | 44422 | 44437 | AAAAAAAAAATTAATG | 6 | 828 |
| 716636 | 2034 | 2049 | 44423 | 44438 | TAAAAAAAAAATTAAT | 1 | 829 |
| 716637 | 2035 | 2050 | 44424 | 44439 | TTAAAAAAAAAATTAA | 0 | 830 |
| 716638 | 2036 | 2051 | 44425 | 44440 | TTTAAAAAAAAAATTA | 3 | 831 |
| 716639 | 2037 | 2052 | 44426 | 44441 | GTTTAAAAAAAAAATT | 2 | 832 |
| 716640 | 2038 | 2053 | 44427 | 44442 | TGTTTAAAAAAAAAAT | 2 | 833 |
| 716641 | 2039 | 2054 | 44428 | 44443 | TTGTTTAAAAAAAAAA | 0 | 834 |
| 716642 | 2040 | 2055 | 44429 | 44444 | ATTGTTTAAAAAAAAA | 0 | 835 |
| 716643 | 2041 | 2056 | 44430 | 44445 | CATTGTTTAAAAAAAA | 0 | 836 |
| 716644 | 2042 | 2057 | 44431 | 44446 | TCATTGTTTAAAAAAA | 0 | 837 |
| 716645 | 2043 | 2058 | 44432 | 44447 | TTCATTGTTTAAAAAA | 6 | 838 |
| 716646 | 2044 | 2059 | 44433 | 44448 | CTTCATTGTTTAAAAA | 11 | 839 |
| 716647 | 2045 | 2060 | 44434 | 44449 | ACTTCATTGTTTAAAA | 0 | 840 |
| 716648 | 2046 | 2061 | 44435 | 44450 | CACTTCATTGTTTAAA | 12 | 841 |

### Example 6: Antisense Inhibition of Human K-Ras in A431 Cells

[0358] Antisense oligonucleotides were designed targeting a K-Ras nucleic acid and were tested for their effects on K-Ras mRNA in vitro. The antisense oligonucleotides were tested in a series of experiments that had similar culture conditions. The results for each experiment are presented in separate tables shown below. Cultured A431cells at a density of 5,000 cells per well were treated with 2,000 nM antisense oligonucleotide by free uptake. After a treatment period of approximately 24 hours, RNA was isolated from the cells and K-Ras mRNA levels were measured by quantitative real-time PCR. Human primer probe set RTS3496_MGB was used to measure mRNA levels. K-Ras mRNA levels were adjusted according to total RNA content, as measured by RIBOGREEN®. Results are presented as percent inhibition of K-Ras, relative to untreated control cells. As used herein, a value of ‘0’ indicates that treatment with the antisense oligonucleotide did not inhibit mRNA levels.

[0359] The newly designed chimeric antisense oligonucleotides in the Tables below were designed as 3-10-3 cEt gapmers or deoxy, MOE, and (S)-cEt gapmers. The 3-10-3 cEt gapmers are 16 nucleosides in length, wherein the central gap segment comprises of ten 2′-deoxynucleosides and is flanked by wing segments on the 5′ direction and the 3′ direction comprising three nucleosides each. The deoxy, MOE and (S)-cEt oligonucleotides are 16 nucleosides in length wherein the nucleoside have either a MOE sugar modification, an (S)-cEt sugar modification, or a deoxy modification. The ‘Chemistry’ column describes the sugar modifications of each oligonucleotide. ‘k’ indicates an (S)-cEt sugar modification; ‘d’ indicates deoxyribose; the number after ‘d’ indicates the number of deoxynucleosides; and ‘e’ indicates a MOE modification. The internucleoside linkages throughout each gapmer are phosphorothioate (P═S) linkages. All cytosine residues throughout each gapmer are 5-methylcytosines. “Start site” indicates the 5′-most nucleoside to which the gapmer is targeted in the human gene sequence. “Stop site” indicates the 3′-most nucleoside to which the gapmer is targeted human gene sequence. Each gapmer listed in the Tables below is targeted to either SEQ ID NO: 1 or SEQ ID NO: 2. ‘N/A’ indicates that the antisense oligonucleotide does not target that particular gene sequence with 100% complementarity.

TABLE 14
Inhibition of K-Ras mRNA by gapmers
targeting SEQ ID NO: 1 and 2

| | SEQ ID | SEQ ID | SEQ ID | SEQ ID | | | | |
|---|---|---|---|---|---|---|---|---|
| | NO: 1 | NO: 1 | NO: 2 | NO: 2 | | | | SEQ |
| ISIS | Start | Stop | Start | Stop | | | % | ID |
| NO | Site | Site | Site | Site | Sequence | Chemistry | Inhibition | NO |
| 540806 | 2981 | 2996 | 45370 | 45385 | GCATGAAGATTTCTGG | kkk-d10-kkk | 62 | 122 |
| 651600 | 2095 | 2110 | 44484 | 44499 | TAACCAGTGTTAAGAG | kkk-d10-kkk | 40 | 691 |
| 651603 | 2120 | 2135 | 44509 | 44524 | GAAAAGTGTTTATGCA | kkk-d10-kkk | 60 | 692 |
| 651633 | 2620 | 2635 | 45009 | 45024 | GGGAATTACAAGTATT | kkk-d10-kkk | 28 | 842 |
| 651634 | 2634 | 2649 | 45023 | 45038 | AATCTTATGGTTAGGG | kkk-d10-kkk | 45 | 316 |
| 651770 | 4332 | 4347 | 46721 | 46736 | TGTGCAATGGTGACAA | kkk-d10-kkk | 28 | 843 |
| 652019 | 1918 | 1933 | 44307 | 44322 | CTTGATTTGTCAGCAG | kkk-d10-kkk | 51 | 304 |
| 652028 | 2093 | 2108 | 44482 | 44497 | ACCAGTGTTAAGAGAA | kkk-d10-kkk | 60 | 334 |
| 652029 | 2118 | 2133 | 44507 | 44522 | AAAGTGTTTATGCAAT | kkk-d10-kkk | 29 | 335 |
| 695867 | 1130 | 1145 | 43519 | 43534 | TCCATTTATGTGACTA | kkk-d10-kkk | 70 | 506 |
| 696039 | 2092 | 2107 | 44481 | 44496 | CCAGTGTTAAGAGAAC | kkk-d10-kkk | 33 | 710 |
| 696042 | 2107 | 2122 | 44496 | 44511 | GCAATGTTAATTTAAC | kkk-d10-kkk | 17 | 713 |
| 696043 | 2113 | 2128 | 44502 | 44517 | GTTTATGCAATGTTAA | kkk-d10-kkk | 55 | 714 |
| 696044 | 2115 | 2130 | 44504 | 44519 | GTGTTTATGCAATGTT | kkk-d10-kkk | 79 | 715 |
| 696045 | 2127 | 2142 | 44516 | 44531 | CAGACTTGAAAAGTGT | kkk-d10-kkk | 24 | 716 |
| 696121 | 2635 | 2650 | 45024 | 45039 | AAATCTTATGGTTAGG | kkk-d10-kkk | 34 | 844 |
| 696357 | 4331 | 4346 | 46720 | 46735 | GTGCAATGGTGACAAC | kkk-d10-kkk | 38 | 845 |
| 696358 | 4334 | 4349 | 46723 | 46738 | ATTGTGCAATGGTGAC | kkk-d10-kkk | 57 | 846 |
| 696359 | 4336 | 4351 | 46725 | 46740 | AAATTGTGCAATGGTG | kkk-d10-kkk | 48 | 847 |
| 716649 | 2094 | 2109 | 44483 | 44498 | AACCAGTGTTAAGAGA | kkk-d10-kkk | 35 | 848 |
| 716650 | 2108 | 2123 | 44497 | 44512 | TGCAATGTTAATTTAA | kkk-d10-kkk | 13 | 849 |
| 716651 | 2109 | 2124 | 44498 | 44513 | ATGCAATGTTAATTTA | kkk-d10-kkk | 9 | 850 |
| 716652 | 2110 | 2125 | 44499 | 44514 | TATGCAATGTTAATTT | kkk-d10-kkk | 8 | 851 |
| 716653 | 2111 | 2126 | 44500 | 44515 | TTATGCAATGTTAATT | kkk-d10-kkk | 3 | 852 |
| 716654 | 2112 | 2127 | 44501 | 44516 | TTTATGCAATGTTAAT | kkk-d10-kkk | 34 | 853 |
| 716655 | 2114 | 2129 | 44503 | 44518 | TGTTTATGCAATGTTA | kkk-d10-kkk | 58 | 854 |
| 716656 | 2116 | 2131 | 44505 | 44520 | AGTGTTTATGCAATGT | kkk-d10-kkk | 69 | 855 |
| 716657 | 2117 | 2132 | 44506 | 44521 | AAGTGTTTATGCAATG | kkk-d10-kkk | 45 | 856 |
| 716658 | 2119 | 2134 | 44508 | 44523 | AAAAGTGTTTATGCAA | kkk-d10-kkk | 32 | 857 |
| 716659 | 2121 | 2136 | 44510 | 44525 | TGAAAAGTGTTTATGC | kkk-d10-kkk | 40 | 858 |
| 716660 | 2122 | 2137 | 44511 | 44526 | TTGAAAAGTGTTTATG | kkk-d10-kkk | 26 | 859 |
| 716661 | 2123 | 2138 | 44512 | 44527 | CTTGAAAAGTGTTTAT | kkk-d10-kkk | 0 | 860 |
| 716662 | 2124 | 2139 | 44513 | 44528 | ACTTGAAAAGTGTTTA | kkk-d10-kkk | 16 | 861 |
| 716663 | 2125 | 2140 | 44514 | 44529 | GACTTGAAAAGTGTTT | kkk-d10-kkk | 14 | 862 |
| 716664 | 2126 | 2141 | 44515 | 44530 | AGACTTGAAAAGTGTT | kkk-d10-kkk | 28 | 863 |
| 716665 | 2624 | 2639 | 45013 | 45028 | TTAGGGGAATTACAAG | kkk-d10-kkk | 23 | 864 |
| 716666 | 2626 | 2641 | 45015 | 45030 | GGTTAGGGGAATTACA | kkk-d10-kkk | 26 | 865 |
| 716667 | 2628 | 2643 | 45017 | 45032 | ATGGTTAGGGGAATTA | kkk-d10-kkk | 33 | 866 |
| 716668 | 2630 | 2645 | 45019 | 45034 | TTATGGTTAGGGGAAT | kkk-d10-kkk | 21 | 867 |
| 716669 | 2632 | 2647 | 45021 | 45036 | TCTTATGGTTAGGGGA | kkk-d10-kkk | 8 | 868 |
| 716670 | 2633 | 2648 | 45022 | 45037 | ATCTTATGGTTAGGGG | kkk-d10-kkk | 20 | 869 |
| 716671 | 4333 | 4348 | 46722 | 46737 | TTGTGCAATGGTGACA | kkk-d10-kkk | 29 | 870 |
| 716672 | 4335 | 4350 | 46724 | 46739 | AATTGTGCAATGGTGA | kkk-d10-kkk | 46 | 871 |
| 716719 | 1918 | 1933 | 44307 | 44322 | CTTGATTTGTCAGCAG | kkk-d9-kkke | 46 | 872 |
| 716720 | 2093 | 2108 | 44482 | 44497 | ACCAGTGTTAAGAGAA | kkk-d9-kkke | 44 | 873 |
| 716724 | 1918 | 1933 | 44307 | 44322 | CTTGATTTGTCAGCAG | kkk-d8-kekek | 41 | 874 |
| 716725 | 2093 | 2108 | 44482 | 44497 | ACCAGTGTTAAGAGAA | kkk-d8-kekek | 51 | 875 |
| 716729 | 1918 | 1933 | 44307 | 44322 | CTTGATTTGTCAGCAG | kkk-d9-keke | 46 | 876 |
| 716730 | 2093 | 2108 | 44482 | 44497 | ACCAGTGTTAAGAGAA | kkk-d9-keke | 40 | 877 |
| 716734 | 1918 | 1933 | 44307 | 44322 | CTTGATTTGTCAGCAG | kk-d10-keke | 54 | 878 |
| 716735 | 2093 | 2108 | 44482 | 44497 | ACCAGTGTTAAGAGAA | kk-d10-keke | 42 | 879 |
| 716739 | 1918 | 1933 | 44307 | 44322 | CTTGATTTGTCAGCAG | kk-d9-kekek | 49 | 880 |
| 716740 | 2093 | 2108 | 44482 | 44497 | ACCAGTGTTAAGAGAA | kk-d9-kekek | 49 | 881 |
| 716744 | 1918 | 1933 | 44307 | 44322 | CTTGATTTGTCAGCAG | k-d10-kekek | 45 | 882 |
| 716745 | 2093 | 2108 | 44482 | 44497 | ACCAGTGTTAAGAGAA | k-d10-kekek | 44 | 883 |
| 716749 | 1918 | 1933 | 44307 | 44322 | CTTGATTTGTCAGCAG | k-d9-kekeke | 44 | 884 |
| 716750 | 2093 | 2108 | 44482 | 44497 | ACCAGTGTTAAGAGAA | k-d9-kekeke | 50 | 885 |
| 716754 | 1918 | 1933 | 44307 | 44322 | CTTGATTTGTCAGCAG | kk-d8-kekekk | 33 | 886 |
| 716755 | 2093 | 2108 | 44482 | 44497 | ACCAGTGTTAAGAGAA | kk-d8-kekekk | 52 | 887 |
| 716759 | 1918 | 1933 | 44307 | 44322 | CTTGATTTGTCAGCAG | kkk-d8-kdkdk | 33 | 888 |
| 716760 | 2093 | 2108 | 44482 | 44497 | ACCAGTGTTAAGAGAA | kkk-d8-kdkdk | 50 | 889 |
| 716764 | 1917 | 1932 | 44306 | 44321 | TTGATTTGTCAGCAGG | kkk-d9-kkke | 55 | 890 |
| 716765 | 2092 | 2107 | 44481 | 44496 | CCAGTGTTAAGAGAAC | kkk-d9-kkke | 55 | 891 |
| 716769 | 1917 | 1932 | 44306 | 44321 | TTGATTTGTCAGCAGG | kk-d10-keke | 66 | 892 |
| 716770 | 2092 | 2107 | 44481 | 44496 | CCAGTGTTAAGAGAAC | kk-d10-keke | 42 | 893 |
| 716774 | 1917 | 1932 | 44306 | 44321 | TTGATTTGTCAGCAGG | kk-d9-kekek | 23 | 894 |
| 716775 | 2092 | 2107 | 44481 | 44496 | CCAGTGTTAAGAGAAC | kk-d9-kekek | 43 | 895 |
| 716779 | 1917 | 1932 | 44306 | 44321 | TTGATTTGTCAGCAGG | kk-d8-kekekk | 29 | 896 |
| 716780 | 2092 | 2107 | 44481 | 44496 | CCAGTGTTAAGAGAAC | kk-d8-kekekk | 53 | 897 |
| 716784 | 1917 | 1932 | 44306 | 44321 | TTGATTTGTCAGCAGG | kk-d9-kdkdk | 53 | 898 |
| 716785 | 2092 | 2107 | 44481 | 44496 | CCAGTGTTAAGAGAAC | kk-d9-kdkdk | 38 | 899 |
| 716789 | 1917 | 1932 | 44306 | 44321 | TTGATTTGTCAGCAGG | kkk-d8-kekek | 37 | 900 |
| 716790 | 2092 | 2107 | 44481 | 44496 | CCAGTGTTAAGAGAAC | kkk-d8-kekek | 37 | 901 |
| 716794 | 1916 | 1931 | 44305 | 44320 | TGATTTGTCAGCAGGA | k-d10-kekek | 47 | 902 |
| 716795 | 2091 | 2106 | 44480 | 44495 | CAGTGTTAAGAGAACT | k-d10-kekek | 23 | 903 |
| 716799 | 1916 | 1931 | 44305 | 44320 | TGATTTGTCAGCAGGA | k-d9-kekeke | 32 | 904 |
| 716800 | 2091 | 2106 | 44480 | 44495 | CAGTGTTAAGAGAACT | k-d9-kekeke | 40 | 905 |
| 716804 | 1916 | 1931 | 44305 | 44320 | TGATTTGTCAGCAGGA | kk-d8-kekekk | 32 | 906 |
| 716805 | 2091 | 2106 | 44480 | 44495 | CAGTGTTAAGAGAACT | kk-d8-kekekk | 35 | 907 |

TABLE 15
Inhibition of K-Ras mRNA by gapmers
targeting SEQ ID NO: 1 and 2

| | SEQ ID | SEQ ID | SEQ ID | SEQ ID | | | | |
|---|---|---|---|---|---|---|---|---|
| | NO: 1 | NO: 1 | NO: 2 | NO: 2 | | | | SEQ |
| ISIS | Start | Stop | Start | Stop | | | % | ID |
| NO | Site | Site | Site | Site | Sequence | Chemistry | Inhibition | NO |
| 540787 | 2460 | 2475 | 44849 | 44864 | GTGTAACATAGGTTAA | kkk-d10-kkk | 30 | 39 |
| 540797 | 2694 | 2709 | 45083 | 45098 | TAGGGCATTTCTGATG | kkk-d10-kkk | 20 | 44 |
| 540802 | 2848 | 2863 | 45237 | 45252 | CTATTCATACCAGGTT | kkk-d10-kkk | 33 | 120 |
| 540806 | 2981 | 2996 | 45370 | 45385 | GCATGAAGATTTCTGG | kkk-d10-kkk | 60 | 122 |
| 651609 | 2247 | 2262 | 44636 | 44651 | TCCAGTGATACTTTCA | kkk-d10-kkk | 51 | 908 |
| 651623 | 2466 | 2481 | 44855 | 44870 | AAGATGGTGTAACATA | kkk-d10-kkk | 30 | 312 |
| 651626 | 2527 | 2542 | 44916 | 44931 | GAGAATGGATATTCAA | kkk-d10-kkk | 8 | 909 |
| 651635 | 2654 | 2669 | 45043 | 45058 | AGATATCCACAGCAGC | kkk-d10-kkk | 58 | 910 |
| 651642 | 2686 | 2701 | 45075 | 45090 | TTCTGATGTGACTCAG | kkk-d10-kkk | 26 | 320 |
| 651653 | 2762 | 2777 | 45151 | 45166 | ATTAGTGATTAGGTCA | kkk-d10-kkk | 55 | 911 |
| 651666 | 2855 | 2870 | 45244 | 45259 | GTTCTGTCTATTCATA | kkk-d10-kkk | 31 | 912 |
| 652034 | 2248 | 2263 | 44637 | 44652 | GTCCAGTGATACTTTC | kkk-d10-kkk | 44 | 340 |
| 652050 | 2434 | 2449 | 44823 | 44838 | ATTGTGCTGAGCTTGA | kkk-d10-kkk | 51 | 356 |
| 652055 | 2531 | 2546 | 44920 | 44935 | AAACGAGAATGGATAT | kkk-d10-kkk | 12 | 361 |
| 652061 | 2652 | 2667 | 45041 | 45056 | ATATCCACAGCAGCAG | kkk-d10-kkk | 39 | 367 |
| 652067 | 2764 | 2779 | 45153 | 45168 | AAATTAGTGATTAGGT | kkk-d10-kkk | 5 | 373 |
| 663560 | 2437 | 2452 | 44826 | 44841 | CAGATTGTGCTGAGCT | kkk-d10-kkk | 29 | 913 |
| 695867 | 1130 | 1145 | 43519 | 43534 | TCCATTTATGTGACTA | kkk-d10-kkk | 57 | 506 |
| 695912 | 1312 | 1327 | 43701 | 43716 | GACTAATAGCAGTGGA | kkk-d10-kkk | 52 | 408 |
| 696044 | 2115 | 2130 | 44504 | 44519 | GTGTTTATGCAATGTT | kkk-d10-kkk | 72 | 715 |
| 696054 | 2246 | 2261 | 44635 | 44650 | CCAGTGATACTTTCAC | kkk-d10-kkk | 15 | 725 |
| 696055 | 2249 | 2264 | 44638 | 44653 | AGTCCAGTGATACTTT | kkk-d10-kkk | 8 | 726 |
| 696090 | 2435 | 2450 | 44824 | 44839 | GATTGTGCTGAGCTTG | kkk-d10-kkk | 63 | 761 |
| 696091 | 2436 | 2451 | 44825 | 44840 | AGATTGTGCTGAGCTT | kkk-d10-kkk | 39 | 762 |
| 696092 | 2438 | 2453 | 44827 | 44842 | ACAGATTGTGCTGAGC | kkk-d10-kkk | 46 | 763 |
| 696096 | 2463 | 2478 | 44852 | 44867 | ATGGTGTAACATAGGT | kkk-d10-kkk | 59 | 914 |
| 696108 | 2529 | 2544 | 44918 | 44933 | ACGAGAATGGATATTC | kkk-d10-kkk | 29 | 915 |
| 696116 | 2563 | 2578 | 44952 | 44967 | CAAGATGACACTAATA | kkk-d10-kkk | 18 | 916 |
| 696117 | 2565 | 2580 | 44954 | 44969 | GGCAAGATGACACTAA | kkk-d10-kkk | 30 | 917 |
| 696118 | 2567 | 2582 | 44956 | 44971 | GAGGCAAGATGACACT | kkk-d10-kkk | 0 | 918 |
| 696132 | 2656 | 2671 | 45045 | 45060 | GGAGATATCCACAGCA | kkk-d10-kkk | 0 | 919 |
| 696137 | 2688 | 2703 | 45077 | 45092 | ATTTCTGATGTGACTC | kkk-d10-kkk | 49 | 920 |
| 696138 | 2692 | 2707 | 45081 | 45096 | GGGCATTTCTGATGTG | kkk-d10-kkk | 7 | 921 |
| 696139 | 2697 | 2712 | 45086 | 45101 | ATGTAGGGCATTTCTG | kkk-d10-kkk | 9 | 922 |
| 696151 | 2759 | 2774 | 45148 | 45163 | AGTGATTAGGTCAAAT | kkk-d10-kkk | 23 | 923 |
| 696152 | 2761 | 2776 | 45150 | 45165 | TTAGTGATTAGGTCAA | kkk-d10-kkk | 59 | 924 |
| 696167 | 2850 | 2865 | 45239 | 45254 | GTCTATTCATACCAGG | kkk-d10-kkk | 60 | 925 |
| 716673 | 2461 | 2476 | 44850 | 44865 | GGTGTAACATAGGTTA | kkk-d10-kkk | 55 | 926 |
| 716674 | 2462 | 2477 | 44851 | 44866 | TGGTGTAACATAGGTT | kkk-d10-kkk | 58 | 927 |
| 716675 | 2464 | 2479 | 44853 | 44868 | GATGGTGTAACATAGG | kkk-d10-kkk | 60 | 928 |
| 716676 | 2465 | 2480 | 44854 | 44869 | AGATGGTGTAACATAG | kkk-d10-kkk | 39 | 929 |
| 716677 | 2528 | 2543 | 44917 | 44932 | CGAGAATGGATATTCA | kkk-d10-kkk | 14 | 930 |
| 716678 | 2530 | 2545 | 44919 | 44934 | AACGAGAATGGATATT | kkk-d10-kkk | 4 | 931 |
| 716679 | 2564 | 2579 | 44953 | 44968 | GCAAGATGACACTAAT | kkk-d10-kkk | 30 | 932 |
| 716680 | 2566 | 2581 | 44955 | 44970 | AGGCAAGATGACACTA | kkk-d10-kkk | 21 | 933 |
| 716681 | 2653 | 2668 | 45042 | 45057 | GATATCCACAGCAGCA | kkk-d10-kkk | 10 | 934 |
| 716682 | 2655 | 2670 | 45044 | 45059 | GAGATATCCACAGCAG | kkk-d10-kkk | 49 | 935 |
| 716683 | 2687 | 2702 | 45076 | 45091 | TTTCTGATGTGACTCA | kkk-d10-kkk | 57 | 936 |
| 716684 | 2689 | 2704 | 45078 | 45093 | CATTTCTGATGTGACT | kkk-d10-kkk | 32 | 937 |
| 716685 | 2690 | 2705 | 45079 | 45094 | GCATTTCTGATGTGAC | kkk-d10-kkk | 24 | 938 |
| 716686 | 2691 | 2706 | 45080 | 45095 | GGCATTTCTGATGTGA | kkk-d10-kkk | 8 | 939 |
| 716687 | 2695 | 2710 | 45084 | 45099 | GTAGGGCATTTCTGAT | kkk-d10-kkk | 14 | 940 |
| 716688 | 2696 | 2711 | 45085 | 45100 | TGTAGGGCATTTCTGA | kkk-d10-kkk | 0 | 941 |
| 716689 | 2698 | 2713 | 45087 | 45102 | GATGTAGGGCATTTCT | kkk-d10-kkk | 0 | 942 |
| 716690 | 2760 | 2775 | 45149 | 45164 | TAGTGATTAGGTCAAA | kkk-d10-kkk | 21 | 943 |
| 716691 | 2763 | 2778 | 45152 | 45167 | AATTAGTGATTAGGTC | kkk-d10-kkk | 32 | 944 |
| 716692 | 2849 | 2864 | 45238 | 45253 | TCTATTCATACCAGGT | kkk-d10-kkk | 26 | 945 |
| 716693 | 2851 | 2866 | 45240 | 45255 | TGTCTATTCATACCAG | kkk-d10-kkk | 16 | 946 |
| 716694 | 2852 | 2867 | 45241 | 45256 | CTGTCTATTCATACCA | kkk-d10-kkk | 34 | 947 |
| 716695 | 2853 | 2868 | 45242 | 45257 | TCTGTCTATTCATACC | kkk-d10-kkk | 12 | 948 |
| 716696 | 2854 | 2869 | 45243 | 45258 | TTCTGTCTATTCATAC | kkk-d10-kkk | 10 | 949 |
| 716721 | 2248 | 2263 | 44637 | 44652 | GTCCAGTGATACTTTC | kkk-d9-kkke | 48 | 950 |
| 716726 | 2248 | 2263 | 44637 | 44652 | GTCCAGTGATACTTTC | kkk-d8-kekek | 21 | 951 |
| 716731 | 2248 | 2263 | 44637 | 44652 | GTCCAGTGATACTTTC | kkk-d9-keke | 33 | 952 |
| 716736 | 2248 | 2263 | 44637 | 44652 | GTCCAGTGATACTTTC | kk-d10-keke | 39 | 953 |
| 716741 | 2248 | 2263 | 44637 | 44652 | GTCCAGTGATACTTTC | kk-d9-kekek | 43 | 954 |
| 716746 | 2248 | 2263 | 44637 | 44652 | GTCCAGTGATACTTTC | k-d10-kekek | 36 | 955 |
| 716751 | 2248 | 2263 | 44637 | 44652 | GTCCAGTGATACTTTC | k-d9-kekeke | 20 | 956 |
| 716756 | 2248 | 2263 | 44637 | 44652 | GTCCAGTGATACTTTC | kk-d8-kekekk | 22 | 957 |
| 716761 | 2248 | 2263 | 44637 | 44652 | GTCCAGTGATACTTTC | kkk-d8-kdkdk | 30 | 958 |
| 716766 | 2247 | 2262 | 44636 | 44651 | TCCAGTGATACTTTCA | kkk-d9-kkke | 47 | 959 |
| 716771 | 2247 | 2262 | 44636 | 44651 | TCCAGTGATACTTTCA | kk-d10-keke | 39 | 960 |
| 716776 | 2247 | 2262 | 44636 | 44651 | TCCAGTGATACTTTCA | kk-d9-kekek | 37 | 961 |
| 716781 | 2247 | 2262 | 44636 | 44651 | TCCAGTGATACTTTCA | kk-d8-kekekk | 24 | 962 |
| 716786 | 2247 | 2262 | 44636 | 44651 | TCCAGTGATACTTTCA | kk-d9-kdkdk | 35 | 963 |
| 716791 | 2247 | 2262 | 44636 | 44651 | TCCAGTGATACTTTCA | kkk-d8-kekek | 48 | 964 |
| 716796 | 2246 | 2261 | 44635 | 44650 | CCAGTGATACTTTCAC | k-d10-kekek | 0 | 965 |
| 716801 | 2246 | 2261 | 44635 | 44650 | CCAGTGATACTTTCAC | k-d9-kekeke | 16 | 966 |
| 716806 | 2246 | 2261 | 44635 | 44650 | CCAGTGATACTTTCAC | kk-d8-kekekk | 17 | 967 |

TABLE 16
Inhibition of K-Ras mRNA by gapmers
targeting SEQ ID NO: 1 and 2

| | SEQ ID | SEQ ID | SEQ ID | SEQ ID | | | | |
|---|---|---|---|---|---|---|---|---|
| | NO: 1 | NO: 1 | NO: 2 | NO: 2 | | | | SEQ |
| ISIS | Start | Stop | Start | Stop | | | % | ID |
| NO | Site | Site | Site | Site | Sequence | Chemistry | Inhibition | NO |
| 540806 | 2981 | 2996 | 45370 | 45385 | GCATGAAGATTTCTGG | kkk-d10-kkk | 66 | 122 |
| 540831 | 4276 | 4291 | 46665 | 46680 | TGCAGTGTGACTCAGT | kkk-d10-kkk | 55 | 61 |
| 651720 | 3715 | 3730 | 46104 | 46119 | CTTATGCAGAGAAAAC | kkk-d10-kkk | 8 | 968 |
| 651721 | 3721 | 3736 | 46110 | 46125 | TAATTACTTATGCAGA | kkk-d10-kkk | 17 | 969 |
| 651759 | 4273 | 4288 | 46662 | 46677 | AGTGTGACTCAGTTAA | kkk-d10-kkk | 53 | 970 |
| 651760 | 4274 | 4289 | 46663 | 46678 | CAGTGTGACTCAGTTA | kkk-d10-kkk | 53 | 971 |
| 651761 | 4275 | 4290 | 46664 | 46679 | GCAGTGTGACTCAGTT | kkk-d10-kkk | 48 | 972 |
| 651795 | 4620 | 4635 | 47009 | 47024 | CCAGTATTAACACAGA | kkk-d10-kkk | 37 | 973 |
| 652112 | 3722 | 3737 | 46111 | 46126 | TTAATTACTTATGCAG | kkk-d10-kkk | 32 | 974 |
| 652132 | 4036 | 4051 | 46425 | 46440 | ACCATTCAAAGTTCAC | kkk-d10-kkk | 34 | 975 |
| 652157 | 4524 | 4539 | 46913 | 46928 | CTTTTTGACAAATGGA | kkk-d10-kkk | 22 | 976 |
| 695867 | 1130 | 1145 | 43519 | 43534 | TCCATTTATGTGACTA | kkk-d10-kkk | 63 | 506 |
| 696271 | 3719 | 3734 | 46108 | 46123 | ATTACTTATGCAGAGA | kkk-d10-kkk | 60 | 977 |
| 696316 | 4029 | 4044 | 46418 | 46433 | AAAGTTCACATAAAGG | kkk-d10-kkk | 38 | 978 |
| 696317 | 4035 | 4050 | 46424 | 46439 | CCATTCAAAGTTCACA | kkk-d10-kkk | 42 | 979 |
| 696318 | 4037 | 4052 | 46426 | 46441 | AACCATTCAAAGTTCA | kkk-d10-kkk | 35 | 980 |
| 696377 | 4525 | 4540 | 46914 | 46929 | ACTTTTTGACAAATGG | kkk-d10-kkk | 46 | 981 |
| 696378 | 4530 | 4545 | 46919 | 46934 | TCATTACTTTTTGACA | kkk-d10-kkk | 4 | 982 |
| 696385 | 4617 | 4632 | 47006 | 47021 | GTATTAACACAGAAGT | kkk-d10-kkk | 0 | 983 |
| 696386 | 4622 | 4637 | 47011 | 47026 | ATCCAGTATTAACACA | kkk-d10-kkk | 0 | 984 |
| 696556 | N/A | N/A | 10213 | 10228 | CTGAATTAGTCTCCAT | kkk-d10-kkk | 48 | 985 |
| 716697 | 3716 | 3731 | 46105 | 46120 | ACTTATGCAGAGAAAA | kkk-d10-kkk | 37 | 986 |
| 716698 | 3717 | 3732 | 46106 | 46121 | TACTTATGCAGAGAAA | kkk-d10-kkk | 0 | 987 |
| 716699 | 3718 | 3733 | 46107 | 46122 | TTACTTATGCAGAGAA | kkk-d10-kkk | 46 | 988 |
| 716700 | 3720 | 3735 | 46109 | 46124 | AATTACTTATGCAGAG | kkk-d10-kkk | 44 | 989 |
| 716701 | 4030 | 4045 | 46419 | 46434 | CAAAGTTCACATAAAG | kkk-d10-kkk | 21 | 990 |
| 716702 | 4031 | 4046 | 46420 | 46435 | TCAAAGTTCACATAAA | kkk-d10-kkk | 19 | 991 |
| 716703 | 4032 | 4047 | 46421 | 46436 | TTCAAAGTTCACATAA | kkk-d10-kkk | 7 | 992 |
| 716704 | 4033 | 4048 | 46422 | 46437 | ATTCAAAGTTCACATA | kkk-d10-kkk | 0 | 993 |
| 716705 | 4034 | 4049 | 46423 | 46438 | CATTCAAAGTTCACAT | kkk-d10-kkk | 2 | 994 |
| 716706 | 4526 | 4541 | 46915 | 46930 | TACTTTTTGACAAATG | kkk-d10-kkk | 37 | 995 |
| 716707 | 4527 | 4542 | 46916 | 46931 | TTACTTTTTGACAAAT | kkk-d10-kkk | 0 | 996 |
| 716708 | 4528 | 4543 | 46917 | 46932 | ATTACTTTTTGACAAA | kkk-d10-kkk | 0 | 997 |
| 716709 | 4529 | 4544 | 46918 | 46933 | CATTACTTTTTGACAA | kkk-d10-kkk | 8 | 998 |
| 716710 | 4618 | 4633 | 47007 | 47022 | AGTATTAACACAGAAG | kkk-d10-kkk | 27 | 999 |
| 716711 | 4619 | 4634 | 47008 | 47023 | CAGTATTAACACAGAA | kkk-d10-kkk | 7 | 1000 |
| 716712 | 4621 | 4636 | 47010 | 47025 | TCCAGTATTAACACAG | kkk-d10-kkk | 34 | 1001 |
| 716713 | N/A | N/A | 10204 | 10219 | TCTCCATTAGTAAATA | kkk-d10-kkk | 13 | 1002 |
| 716714 | N/A | N/A | 10209 | 10224 | ATTAGTCTCCATTAGT | kkk-d10-kkk | 29 | 1003 |
| 716715 | N/A | N/A | 10212 | 10227 | TGAATTAGTCTCCATT | kkk-d10-kkk | 17 | 1004 |
| 716716 | N/A | N/A | 10214 | 10229 | TCTGAATTAGTCTCCA | kkk-d10-kkk | 62 | 1005 |
| 716717 | N/A | N/A | 10217 | 10232 | AAATCTGAATTAGTCT | kkk-d10-kkk | 25 | 1006 |
| 716718 | N/A | N/A | 10222 | 10237 | CTTACAAATCTGAATT | kkk-d10-kkk | 7 | 1007 |
| 716722 | 4036 | 4051 | 46425 | 46440 | ACCATTCAAAGTTCAC | kkk-d9-kkke | 42 | 1008 |
| 716723 | 4274 | 4289 | 46663 | 46678 | CAGTGTGACTCAGTTA | kkk-d9-kkke | 42 | 1009 |
| 716727 | 4036 | 4051 | 46425 | 46440 | ACCATTCAAAGTTCAC | kkk-d8-kekek | 26 | 1010 |
| 716728 | 4274 | 4289 | 46663 | 46678 | CAGTGTGACTCAGTTA | kkk-d8-kekek | 63 | 1011 |
| 716732 | 4036 | 4051 | 46425 | 46440 | ACCATTCAAAGTTCAC | kkk-d9-keke | 30 | 1012 |
| 716733 | 4274 | 4289 | 46663 | 46678 | CAGTGTGACTCAGTTA | kkk-d9-keke | 55 | 1013 |
| 716737 | 4036 | 4051 | 46425 | 46440 | ACCATTCAAAGTTCAC | kk-d10-keke | 41 | 1014 |
| 716738 | 4274 | 4289 | 46663 | 46678 | CAGTGTGACTCAGTTA | kk-d10-keke | 51 | 1015 |
| 716742 | 4036 | 4051 | 46425 | 46440 | ACCATTCAAAGTTCAC | kk-d9-kekek | 36 | 1016 |
| 716743 | 4274 | 4289 | 46663 | 46678 | CAGTGTGACTCAGTTA | kk-d9-kekek | 56 | 1017 |
| 716747 | 4036 | 4051 | 46425 | 46440 | ACCATTCAAAGTTCAC | k-d10-kekek | 18 | 1018 |
| 716748 | 4274 | 4289 | 46663 | 46678 | CAGTGTGACTCAGTTA | k-d10-kekek | 32 | 1019 |
| 716752 | 4036 | 4051 | 46425 | 46440 | ACCATTCAAAGTTCAC | k-d9-kekeke | 15 | 1020 |
| 716753 | 4274 | 4289 | 46663 | 46678 | CAGTGTGACTCAGTTA | k-d9-kekeke | 54 | 1021 |
| 716757 | 4036 | 4051 | 46425 | 46440 | ACCATTCAAAGTTCAC | kk-d8-kekekk | 7 | 1022 |
| 716758 | 4274 | 4289 | 46663 | 46678 | CAGTGTGACTCAGTTA | kk-d8-kekekk | 63 | 1023 |
| 716762 | 4036 | 4051 | 46425 | 46440 | ACCATTCAAAGTTCAC | kkk-d8-kdkdk | 12 | 1024 |
| 716763 | 4274 | 4289 | 46663 | 46678 | CAGTGTGACTCAGTTA | kkk-d8-kdkdk | 60 | 1025 |
| 716767 | 4035 | 4050 | 46424 | 46439 | CCATTCAAAGTTCACA | kkk-d9-kkke | 41 | 1026 |
| 716768 | 4273 | 4288 | 46662 | 46677 | AGTGTGACTCAGTTAA | kkk-d9-kkke | 15 | 1027 |
| 716772 | 4035 | 4050 | 46424 | 46439 | CCATTCAAAGTTCACA | kk-d10-keke | 63 | 1028 |
| 716773 | 4273 | 4288 | 46662 | 46677 | AGTGTGACTCAGTTAA | kk-d10-keke | 41 | 1029 |
| 716777 | 4035 | 4050 | 46424 | 46439 | CCATTCAAAGTTCACA | kk-d9-kekek | 36 | 1030 |
| 716778 | 4273 | 4288 | 46662 | 46677 | AGTGTGACTCAGTTAA | kk-d9-kekek | 48 | 1031 |
| 716782 | 4035 | 4050 | 46424 | 46439 | CCATTCAAAGTTCACA | kk-d8-kekekk | 57 | 1032 |
| 716783 | 4273 | 4288 | 46662 | 46677 | AGTGTGACTCAGTTAA | kk-d8-kekekk | 47 | 1033 |
| 716787 | 4035 | 4050 | 46424 | 46439 | CCATTCAAAGTTCACA | kk-d9-kdkdk | 31 | 1034 |
| 716788 | 4273 | 4288 | 46662 | 46677 | AGTGTGACTCAGTTAA | kk-d9-kdkdk | 38 | 1035 |
| 716792 | 4035 | 4050 | 46424 | 46439 | CCATTCAAAGTTCACA | kkk-d8-kekek | 39 | 1036 |
| 716793 | 4273 | 4288 | 46662 | 46677 | AGTGTGACTCAGTTAA | kkk-d8-kekek | 29 | 1037 |
| 716797 | 4034 | 4049 | 46423 | 46438 | CATTCAAAGTTCACAT | k-d10-kekek | 43 | 1038 |
| 716798 | 4272 | 4287 | 46661 | 46676 | GTGTGACTCAGTTAAA | k-d10-kekek | 30 | 1039 |
| 716802 | 4034 | 4049 | 46423 | 46438 | CATTCAAAGTTCACAT | k-d9-kekeke | 24 | 1040 |
| 716803 | 4272 | 4287 | 46661 | 46676 | GTGTGACTCAGTTAAA | k-d9-kekeke | 25 | 1041 |
| 716807 | 4034 | 4049 | 46423 | 46438 | CATTCAAAGTTCACAT | kk-d8-kekekk | 96 | 1042 |
| 716808 | 4272 | 4287 | 46661 | 46676 | GTGTGACTCAGTTAAA | kk-d8-kekekk | 38 | 1043 |

### Example 7: Antisense Inhibition of Human K-Ras in A431 Cells by cEt Gapmers

[0360] Antisense oligonucleotides were designed targeting a K-Ras nucleic acid and were tested for their effects on K-Ras mRNA in vitro. The antisense oligonucleotides were tested in a series of experiments that had similar culture conditions. The results for each experiment are presented in separate tables shown below. Cultured A431cells at a density of 5,000 cells per well were treated with 1,000 nM antisense oligonucleotide by free uptake. After a treatment period of approximately 24 hours, RNA was isolated from the cells and K-Ras mRNA levels were measured by quantitative real-time PCR. Human primer probe set RTS3496_MGB was used to measure mRNA levels. K-Ras mRNA levels were adjusted according to total RNA content, as measured by RIBOGREEN®. Results are presented as percent inhibition of K-Ras, relative to untreated control cells. As used herein, a value of ‘0’ indicates that treatment with the antisense oligonucleotide did not inhibit mRNA levels.

[0361] The newly designed chimeric antisense oligonucleotides in the Tables below were designed as 3-10-3 cEt gapmers. The gapmers are 16 nucleosides in length, wherein the central gap segment comprises of ten 2′-deoxynucleosides and is flanked by wing segments on the 5′ direction and the 3′ direction comprising three nucleosides each. Each nucleoside in the 5′ wing segment and each nucleoside in the 3′ wing segment has a cEt sugar modification. The internucleoside linkages throughout each gapmer are phosphorothioate (P═S) linkages. All cytosine residues throughout each gapmer are 5-methylcytosines. “Start site” indicates the 5′-most nucleoside to which the gapmer is targeted in the human gene sequence. “Stop site” indicates the 3′-most nucleoside to which the gapmer is targeted human gene sequence. Each gapmer listed in the Tables below is targeted to either SEQ ID NO: 1 or SEQ ID NO: 2. ‘N/A’ indicates that the antisense oligonucleotide does not target that particular gene sequence with 100% complementarity. In case the sequence alignment for a target gene in a particular table is not shown, it is understood that none of the oligonucleotides presented in that table align with 100% complementarity with that target gene.

TABLE 17
Inhibition of K-Ras mRNA by 3-10-3 cEt gapmers
targeting SEQ ID NO: 1 and 2

| | SEQ ID | SEQ ID | SEQ ID | SEQ ID | | | |
|---|---|---|---|---|---|---|---|
| | NO: 1 | NO: 1 | NO: 2 | NO: 2 | | | SEQ |
| ISIS | Start | Stop | Start | Stop | | % | ID |
| NO | Site | Site | Site | Site | Sequence | Inhibition | NO |
| 540806 | 2981 | 2996 | 45370 | 45385 | GCATGAAGATTTCTGG | 73 | 122 |
| 540806 | 2981 | 2996 | 45370 | 45385 | GCATGAAGATTTCTGG | 67 | 122 |
| 651626 | 2527 | 2542 | 44916 | 44931 | GAGAATGGATATTCAA | 26 | 909 |
| 651627 | 2533 | 2548 | 44922 | 44937 | TAAAACGAGAATGGAT | 11 | 1044 |
| 651633 | 2620 | 2635 | 45009 | 45024 | GGGAATTACAAGTATT | 38 | 842 |
| 651634 | 2634 | 2649 | 45023 | 45038 | AATCTTATGGTTAGGG | 63 | 316 |
| 651635 | 2654 | 2669 | 45043 | 45058 | AGATATCCACAGCAGC | 68 | 910 |
| 651636 | 2660 | 2675 | 45049 | 45064 | TCATGGAGATATCCAC | 35 | 1045 |
| 651644 | 2713 | 2728 | 45102 | 45117 | GCCCTGAGGAAATAAG | 11 | 1046 |
| 651651 | 2750 | 2765 | 45139 | 45154 | GTCAAATCCCTTTATG | 24 | 1047 |
| 651658 | 2813 | 2828 | 45202 | 45217 | TAATGGATTGGGCAGC | 41 | 1048 |
| 651663 | 2823 | 2838 | 45212 | 45227 | CTACTGTCGCTAATGG | 38 | 1049 |
| 696095 | 2458 | 2473 | 44847 | 44862 | GTAACATAGGTTAAAA | 18 | 1050 |
| 696096 | 2463 | 2478 | 44852 | 44867 | ATGGTGTAACATAGGT | 67 | 914 |
| 696097 | 2468 | 2483 | 44857 | 44872 | TGAAGATGGTGTAACA | 44 | 1051 |
| 696098 | 2470 | 2485 | 44859 | 44874 | ACTGAAGATGGTGTAA | 15 | 1052 |
| 696099 | 2474 | 2489 | 44863 | 44878 | TGGCACTGAAGATGGT | 46 | 1053 |
| 696100 | 2476 | 2491 | 44865 | 44880 | ACTGGCACTGAAGATG | 39 | 1054 |
| 696101 | 2480 | 2495 | 44869 | 44884 | CAAGACTGGCACTGAA | 32 | 1055 |
| 696102 | 2482 | 2497 | 44871 | 44886 | CCCAAGACTGGCACTG | 27 | 1056 |
| 696103 | 2488 | 2503 | 44877 | 44892 | ATTTTGCCCAAGACTG | 33 | 1057 |
| 696104 | 2492 | 2507 | 44881 | 44896 | CACAATTTTGCCCAAG | 36 | 1058 |
| 696105 | 2499 | 2514 | 44888 | 44903 | CCTCTTGCACAATTTT | 59 | 1059 |
| 696106 | 2504 | 2519 | 44893 | 44908 | CTTCACCTCTTGCACA | 28 | 1060 |
| 696107 | 2510 | 2525 | 44899 | 44914 | TATAAACTTCACCTCT | 17 | 1061 |
| 696108 | 2529 | 2544 | 44918 | 44933 | ACGAGAATGGATATTC | 58 | 915 |
| 696109 | 2535 | 2550 | 44924 | 44939 | CCTAAAACGAGAATGG | 10 | 1062 |
| 696110 | 2537 | 2552 | 44926 | 44941 | GTCCTAAAACGAGAAT | 22 | 1063 |
| 696111 | 2539 | 2554 | 44928 | 44943 | GAGTCCTAAAACGAGA | 39 | 1064 |
| 696112 | 2545 | 2560 | 44934 | 44949 | GAAGAAGAGTCCTAAA | 15 | 1065 |
| 696113 | 2549 | 2564 | 44938 | 44953 | TATGGAAGAAGAGTCC | 34 | 1066 |
| 696114 | 2553 | 2568 | 44942 | 44957 | CTAATATGGAAGAAGA | 10 | 1067 |
| 696115 | 2558 | 2573 | 44947 | 44962 | TGACACTAATATGGAA | 17 | 1068 |
| 696116 | 2563 | 2578 | 44952 | 44967 | CAAGATGACACTAATA | 18 | 916 |
| 696117 | 2565 | 2580 | 44954 | 44969 | GGCAAGATGACACTAA | 51 | 917 |
| 696118 | 2567 | 2582 | 44956 | 44971 | GAGGCAAGATGACACT | 18 | 918 |
| 696119 | 2585 | 2600 | 44974 | 44989 | GGGCATGTGGAAGGTA | 20 | 1069 |
| 696120 | 2609 | 2624 | 44998 | 45013 | GTATTAAAACTGCATC | 34 | 1070 |
| 696121 | 2635 | 2650 | 45024 | 45039 | AAATCTTATGGTTAGG | 40 | 844 |
| 696122 | 2636 | 2651 | 45025 | 45040 | TAAATCTTATGGTTAG | 13 | 1071 |
| 696123 | 2637 | 2652 | 45026 | 45041 | GTAAATCTTATGGTTA | 26 | 1072 |
| 696124 | 2638 | 2653 | 45027 | 45042 | AGTAAATCTTATGGTT | 28 | 1073 |
| 696125 | 2639 | 2654 | 45028 | 45043 | CAGTAAATCTTATGGT | 25 | 1074 |
| 696126 | 2640 | 2655 | 45029 | 45044 | GCAGTAAATCTTATGG | 50 | 1075 |
| 696127 | 2641 | 2656 | 45030 | 45045 | AGCAGTAAATCTTATG | 46 | 1076 |
| 696128 | 2642 | 2657 | 45031 | 45046 | CAGCAGTAAATCTTAT | 25 | 1077 |
| 696129 | 2645 | 2660 | 45034 | 45049 | CAGCAGCAGTAAATCT | 37 | 1078 |
| 696130 | 2647 | 2662 | 45036 | 45051 | CACAGCAGCAGTAAAT | 11 | 1079 |
| 696131 | 2649 | 2664 | 45038 | 45053 | TCCACAGCAGCAGTAA | 37 | 1080 |
| 696132 | 2656 | 2671 | 45045 | 45060 | GGAGATATCCACAGCA | 23 | 919 |
| 696133 | 2658 | 2673 | 45047 | 45062 | ATGGAGATATCCACAG | 17 | 1081 |
| 696134 | 2664 | 2679 | 45053 | 45068 | AACTTCATGGAGATAT | 38 | 1082 |
| 696135 | 2668 | 2683 | 45057 | 45072 | GGAAAACTTCATGGAG | 37 | 1083 |
| 696136 | 2671 | 2686 | 45060 | 45075 | GTGGGAAAACTTCATG | 12 | 1084 |
| 696137 | 2688 | 2703 | 45077 | 45092 | ATTTCTGATGTGACTC | 73 | 920 |
| 696138 | 2692 | 2707 | 45081 | 45096 | GGGCATTTCTGATGTG | 7 | 921 |
| 696139 | 2697 | 2712 | 45086 | 45101 | ATGTAGGGCATTTCTG | 24 | 922 |
| 696140 | 2701 | 2716 | 45090 | 45105 | TAAGATGTAGGGCATT | 30 | 1085 |
| 696141 | 2703 | 2718 | 45092 | 45107 | AATAAGATGTAGGGCA | 15 | 1086 |
| 696142 | 2705 | 2720 | 45094 | 45109 | GAAATAAGATGTAGGG | 26 | 1087 |
| 696143 | 2715 | 2730 | 45104 | 45119 | GAGCCCTGAGGAAATA | 19 | 1088 |
| 696144 | 2718 | 2733 | 45107 | 45122 | CTTGAGCCCTGAGGAA | 21 | 1089 |
| 696145 | 2727 | 2742 | 45116 | 45131 | TCAGATTCTCTTGAGC | 22 | 1090 |
| 696146 | 2728 | 2743 | 45117 | 45132 | GTCAGATTCTCTTGAG | 37 | 1091 |
| 696147 | 2729 | 2744 | 45118 | 45133 | TGTCAGATTCTCTTGA | 33 | 1092 |
| 696148 | 2732 | 2747 | 45121 | 45136 | ATCTGTCAGATTCTCT | 48 | 1093 |
| 696149 | 2745 | 2760 | 45134 | 45149 | ATCCCTTTATGGTATC | 14 | 1094 |
| 696150 | 2748 | 2763 | 45137 | 45152 | CAAATCCCTTTATGGT | 18 | 1095 |
| 696151 | 2759 | 2774 | 45148 | 45163 | AGTGATTAGGTCAAAT | 37 | 923 |
| 696152 | 2761 | 2776 | 45150 | 45165 | TTAGTGATTAGGTCAA | 74 | 924 |
| 696153 | 2766 | 2781 | 45155 | 45170 | GAAAATTAGTGATTAG | 34 | 1096 |
| 696154 | 2770 | 2785 | 45159 | 45174 | ACCTGAAAATTAGTGA | 24 | 1097 |
| 696155 | 2777 | 2792 | 45166 | 45181 | AGCCACCACCTGAAAA | 18 | 1098 |
| 696156 | 2787 | 2802 | 45176 | 45191 | TCAAAGCATCAGCCAC | 15 | 1099 |
| 696157 | 2801 | 2816 | 45190 | 45205 | CAGCAAAGAGATGTTC | 21 | 1100 |
| 696158 | 2808 | 2823 | 45197 | 45212 | GATTGGGCAGCAAAGA | 19 | 1101 |
| 696159 | 2811 | 2826 | 45200 | 45215 | ATGGATTGGGCAGCAA | 25 | 1102 |
| 696160 | 2825 | 2840 | 45214 | 45229 | TCCTACTGTCGCTAAT | 53 | 1103 |
| 696161 | 2827 | 2842 | 45216 | 45231 | AATCCTACTGTCGCTA | 37 | 1104 |

TABLE 18
Inhibition of K-Ras mRNA by 3-10-3 cEt
gapmers targeting SEQ ID NO: 2

| | SEQ ID | SEQ ID | | | |
|---|---|---|---|---|---|
| | NO: 2 | NO: 2 | | | SEQ |
| ISIS | Start | Stop | | % Inhi- | ID |
| NO | Site | Site | Sequence | bition | NO |
| 540806 | 45370 | 45385 | GCATGAAGATTTCTGG | 50 | 122 |
| 540806 | 45370 | 45385 | GCATGAAGATTTCTGG | 51 | 122 |
| 663688 | 9544 | 9559 | CCAGAGTCAAGTCTTC | 31 | 1105 |
| 696498 | 4399 | 4414 | ATTAGAGTTTGTGTAT | 11 | 1106 |
| 696499 | 4885 | 4900 | TTATAACAAGGTCTCA | 0 | 1107 |
| 696500 | 4949 | 4964 | CGGTAAATATTAATAA | 0 | 1108 |
| 696501 | 4958 | 4973 | TTTCCAATACGGTAAA | 9 | 1109 |
| 696502 | 4960 | 4975 | AATTTCCAATACGGTA | 28 | 1110 |
| 696503 | 5169 | 5184 | TAATAGATTGAATGCA | 5 | 1111 |
| 696504 | 5280 | 5295 | ACTAAGACTTTTCTGG | 5 | 1112 |
| 696505 | 5482 | 5497 | AAGTTAACAACCACTA | 5 | 1113 |
| 696506 | 5562 | 5577 | AATTGTATCACACACG | 28 | 1114 |
| 696507 | 5572 | 5587 | AGGCTAGAAAAATTGT | 5 | 1115 |
| 696508 | 5694 | 5709 | ATTGTAGATAAACACT | 13 | 1116 |
| 696509 | 5734 | 5749 | ATTATAGGATGAGTAG | 1 | 1117 |
| 696510 | 5754 | 5769 | GAGTAAATGCACAACT | 0 | 1118 |
| 696511 | 5904 | 5919 | GATTGTATAACAAACA | 5 | 1119 |
| 696512 | 5994 | 6009 | AGTGAATATATCTCAG | 20 | 1120 |
| 696513 | 6002 | 6017 | AAGATGCAAGTGAATA | 4 | 1121 |
| 696514 | 6729 | 6744 | AGAGAACTCCGAATTA | 0 | 1122 |
| 696515 | 6988 | 7003 | ATCAGATGAGAGTTGA | 2 | 1123 |
| 696516 | 7188 | 7203 | ACTCATGTAGAGACTT | 6 | 1124 |
| 696517 | 7200 | 7215 | TATCATGACTTCACTC | 16 | 1125 |
| 696518 | 7250 | 7265 | TAAATAGCCAGACTGC | 12 | 1126 |
| 696519 | 7292 | 7307 | TACATAGACAGTTCTT | 24 | 1127 |
| 696520 | 7301 | 7316 | CATAAATGCTACATAG | 7 | 1128 |
| 696521 | 7351 | 7366 | ATGAACTGTACTTCAT | 0 | 1129 |
| 696522 | 7471 | 7486 | ACTATCAAATACTCCA | 26 | 1130 |
| 696523 | 7503 | 7518 | ATATTAGAACATGTCA | 0 | 1131 |
| 696524 | 7545 | 7560 | ATTTTCAGCAGGCCTT | 23 | 1132 |
| 696525 | 7666 | 7681 | AACAAGATTTACCTCT | 0 | 1133 |
| 696526 | 7790 | 7805 | CAAGGTACATTTCAGA | 38 | 1134 |
| 696527 | 7935 | 7950 | CAGATAGGATACAAAT | 3 | 1135 |
| 696528 | 7960 | 7975 | CAATAAAAAGATTGTC | 0 | 1136 |
| 696529 | 8011 | 8026 | ACCTTTACATATGATG | 4 | 1137 |
| 696530 | 8034 | 8049 | TTTCACTAGTACAATT | 6 | 1138 |
| 696531 | 8179 | 8194 | AATAGTACCTTTATAT | 0 | 1139 |
| 696532 | 8412 | 8427 | CATCTGCTTGGGATGG | 11 | 1140 |
| 696533 | 8415 | 8430 | CCTCATCTGCTTGGGA | 16 | 1141 |
| 696534 | 8610 | 8625 | CCTAAGAAACAATCTA | 16 | 1142 |
| 696535 | 8751 | 8766 | ACTTTGACCTGTTCTA | 2 | 1143 |
| 696536 | 8789 | 8804 | TCTTCAAGACACTACA | 7 | 1144 |
| 696537 | 8800 | 8815 | CGCAAAGTGTCTCTTC | 10 | 1145 |
| 696538 | 8815 | 8830 | CAGAACTTGCCTCAGC | 26 | 1146 |
| 696539 | 8885 | 8900 | GATTAGTTATCTAATC | 0 | 1147 |
| 696540 | 8996 | 9011 | CTTAAAATTGGAAGCC | 30 | 1148 |
| 696541 | 9060 | 9075 | ATACAGAGACTATTGC | 34 | 1149 |
| 696542 | 9091 | 9106 | TACACATTGAATTAAC | 3 | 1150 |
| 696543 | 9140 | 9155 | ATTAAAATGGGTGCAC | 8 | 1151 |
| 696544 | 9325 | 9340 | CTGATTGGAAACAAAG | 13 | 1152 |
| 696545 | 9542 | 9557 | AGAGTCAAGTCTTCTG | 0 | 1153 |
| 696546 | 9555 | 9570 | ACCAATGCTTCCCAGA | 30 | 1154 |
| 696547 | 9627 | 9642 | AGATAATCTCAGATAC | 11 | 1155 |
| 696548 | 9736 | 9751 | CAACTATTTAACTACT | 0 | 1156 |
| 696549 | 9813 | 9828 | CAATGGCAGTGAAATC | 21 | 1157 |
| 696550 | 9824 | 9839 | ATCAAAACCTGCAATG | 3 | 1158 |
| 696551 | 9876 | 9891 | AGTCATATCCTTTCTA | 15 | 1159 |
| 696552 | 9889 | 9904 | TTCCAAAATGTGCAGT | 34 | 1160 |
| 696553 | 10022 | 10037 | AACAATAGCCACCCTC | 20 | 1161 |
| 696554 | 10141 | 10156 | CAAGAGTACAGTGCAA | 46 | 1162 |
| 696555 | 10179 | 10194 | TTTGAAAGATAGCTAA | 0 | 1163 |
| 696556 | 10213 | 10228 | CTGAATTAGTCTCCAT | 61 | 985 |
| 696557 | 10504 | 10519 | GATCTCTGAACTATAA | 0 | 1164 |
| 696558 | 10734 | 10749 | CCACAATAAAAGCATG | 15 | 1165 |
| 696559 | 10761 | 10776 | CATAATACTTGAACTG | 29 | 1166 |
| 696560 | 10791 | 10806 | TGAATAGGAAACTGTT | 0 | 1167 |
| 696561 | 10823 | 10838 | ACCAATCCAATGATTA | 29 | 1168 |
| 696562 | 10841 | 10856 | ACACTAAAGATGAAAC | 6 | 1169 |
| 696563 | 10867 | 10882 | GGTAAATAAATACTCT | 26 | 1170 |
| 696564 | 11016 | 11031 | TTACATAAGGCTTTTC | 16 | 1171 |
| 696565 | 11079 | 11094 | CAACCATCCCTCATTG | 8 | 1172 |
| 696566 | 11082 | 11097 | ACCCAACCATCCCTCA | 3 | 1173 |
| 696567 | 11694 | 11709 | ATACGAAATCAATCAT | 12 | 1174 |
| 696568 | 11982 | 11997 | AATTTGCCACTTCTGA | 19 | 1175 |
| 696569 | 12000 | 12015 | CAAAATGTGCACTTTC | 0 | 1176 |
| 696570 | 12091 | 12106 | TTCTTAATTTGACCTA | 20 | 1177 |
| 696571 | 12131 | 12146 | GACCAGTAAAGTTTTA | 27 | 1178 |
| 696572 | 12288 | 12303 | CTAGGATTAAGGAATT | 9 | 1179 |
| 696573 | 12369 | 12384 | AATCTGGTCTGTTTTG | 32 | 1180 |

TABLE 19
Inhibition of K-Ras mRNA by 3-10-3 cEt
gapmers targeting SEQ ID NO: 2

| | SEQ ID | SEQ ID | | | |
|---|---|---|---|---|---|
| | NO: 2 | NO: 2 | | | SEQ |
| ISIS | Start | Stop | | % Inhi- | ID |
| NO | Site | Site | Sequence | bition | NO |
| 540806 | 45370 | 45385 | GCATGAAGATTTCTGG | 69 | 122 |
| 540806 | 45370 | 45385 | GCATGAAGATTTCTGG | 73 | 122 |
| 696581 | 12559 | 12574 | GATTCAACCAATTATG | 29 | 1181 |
| 696582 | 12636 | 12651 | TAATTAGCATGATTGC | 14 | 1182 |
| 696583 | 12753 | 12768 | TATTAAGATCCCAATA | 0 | 1183 |
| 696584 | 12838 | 12853 | TAGTACAGCGAATAGC | 0 | 1184 |
| 696585 | 13223 | 13238 | AAGCAGTGACACTGCT | 0 | 1185 |
| 696586 | 13501 | 13516 | CTCAAGGGTGAAAAAT | 3 | 1186 |
| 696587 | 13593 | 13608 | ATTTTTATGCAGCCAG | 37 | 1187 |
| 696588 | 13672 | 13687 | TAAGATAGCTTCCTGT | 12 | 1188 |
| 696589 | 13684 | 13699 | CTAATTCATATATAAG | 0 | 1189 |
| 696590 | 13800 | 13815 | AGTAAGTGTCTTTTTA | 23 | 1190 |
| 696591 | 13944 | 13959 | CCATAAAGTCTGAGGG | 0 | 1191 |
| 696592 | 13993 | 14008 | GTCAAAGGACATGTAG | 13 | 1192 |
| 696593 | 14208 | 14223 | AGTATATCTAAATCTA | 0 | 1193 |
| 696594 | 14266 | 14281 | ACTCAACACAAGGTGC | 4 | 1194 |
| 696595 | 14514 | 14529 | TACCTCTCATATTATT | 4 | 1195 |
| 696596 | 14611 | 14626 | CCACAAGTGATCACTT | 0 | 1196 |
| 696597 | 14853 | 14868 | GACATTCACTAAAAGT | 0 | 1197 |
| 696598 | 15129 | 15144 | TTTATATACTACACGC | 37 | 1198 |
| 696599 | 15226 | 15241 | TAAAACTGCATACAGG | 4 | 1199 |
| 696600 | 15350 | 15365 | TAGACTTGGGAGTCTT | 0 | 1200 |
| 696601 | 15393 | 15408 | TACATACATGTCTGGT | 34 | 1201 |
| 696602 | 15716 | 15731 | AATTAGCAGTTTTTAG | 6 | 1202 |
| 696603 | 15840 | 15855 | GCAAAAACATAGACGA | 9 | 1203 |
| 696604 | 16077 | 16092 | CAAAGACAGAGCTACC | 0 | 1204 |
| 696605 | 16109 | 16124 | TACCAAAACCACTTGG | 0 | 1205 |
| 696606 | 16313 | 16328 | GTTAAAAATGGGTGGA | 11 | 1206 |
| 696607 | 16473 | 16488 | CAGCATTCCCTGAATC | 0 | 1207 |
| 696608 | 16495 | 16510 | TCTGATAAACCCCAAA | 9 | 1208 |
| 696609 | 16621 | 16636 | CAAAATGTTTTGGCCC | 0 | 1209 |
| 696610 | 16671 | 16686 | GGGAGATCAGATTCAT | 17 | 1210 |
| 696611 | 16679 | 16694 | AATAGGAAGGGAGATC | 14 | 1211 |
| 696612 | 16738 | 16753 | GTATATTAAGTAAGGA | 15 | 1212 |
| 696613 | 16784 | 16799 | GTGAAACTGGACAATC | 0 | 1213 |
| 696614 | 17106 | 17121 | ATTTTTCCAAGGACCG | 51 | 1214 |
| 696615 | 17204 | 17219 | CATGTTGAGGACACAG | 16 | 1215 |
| 696616 | 17383 | 17398 | GTGGAAGAGACATGAA | 15 | 1216 |
| 696617 | 17446 | 17461 | AATCTAGGTGTCACAT | 1 | 1217 |
| 696618 | 17600 | 17615 | CACTTTCCGTTTATAA | 1 | 1218 |
| 696619 | 17640 | 17655 | CGAAAGGTTATTTAAA | 4 | 1219 |
| 696620 | 17704 | 17719 | CACCTGTAGGAAAAGA | 5 | 1220 |
| 696621 | 17715 | 17730 | CTGCTTAATAACACCT | 20 | 1221 |
| 696622 | 17900 | 17915 | ACTGTCATAAGCATAT | 7 | 1222 |
| 696623 | 17902 | 17917 | ATACTGTCATAAGCAT | 23 | 1223 |
| 696624 | 17922 | 17937 | AGCCCTTACTTATATG | 0 | 1224 |
| 696625 | 18046 | 18061 | TACATTCCAAGTATAG | 0 | 1225 |
| 696626 | 18198 | 18213 | ACCAGAACATCAAGTT | 9 | 1226 |
| 696627 | 18203 | 18218 | CATTAACCAGAACATC | 7 | 1227 |
| 696628 | 18220 | 18235 | TCAAGATAAGATAACC | 7 | 1228 |
| 696629 | 18312 | 18327 | CTTCTTTTACACTGAC | 29 | 1229 |
| 696630 | 18523 | 18538 | TACTACTATTCTATAA | 0 | 1230 |
| 696631 | 18658 | 18673 | TAAGACTAGGGAAAAG | 30 | 1231 |
| 696632 | 19173 | 19188 | CTACCTAACAGTCTTG | 6 | 1232 |
| 696633 | 19192 | 19207 | ACTCACCACTACACAC | 0 | 1233 |
| 696634 | 19421 | 19436 | ATGAACGAAGGTAGGT | 24 | 1234 |
| 696635 | 19713 | 19728 | CACAATATAGTCTCCA | 38 | 1235 |
| 696636 | 19761 | 19776 | GGCAATCTGCAGCAAT | 9 | 1236 |
| 696637 | 19828 | 19843 | CTACATCCAACCACCT | 0 | 1237 |
| 696638 | 19926 | 19941 | TTAACATGGCATCCTA | 13 | 1238 |
| 696639 | 19934 | 19949 | AGAGATTCTTAACATG | 25 | 1239 |
| 696640 | 20250 | 20265 | TAACTTAAACTAACTC | 4 | 1240 |
| 696641 | 20285 | 20300 | AATTTGTAGCCTTAGG | 42 | 1241 |
| 696642 | 20289 | 20304 | TACTAATTTGTAGCCT | 9 | 1242 |
| 696643 | 20719 | 20734 | CTAAATAAGGTTTCAG | 7 | 1243 |
| 696644 | 20951 | 20966 | TATACACACGGCATTG | 0 | 1244 |
| 696645 | 21144 | 21159 | CTTAGAAGTGCAATTA | 18 | 1245 |
| 696646 | 21254 | 21269 | GTTTCAAAGTAATCTA | 0 | 1246 |
| 696647 | 21284 | 21299 | TATCGATAGCAAAGTT | 7 | 1247 |
| 696648 | 21398 | 21413 | TCATAAGATGCTTCCA | 10 | 1248 |
| 696649 | 21400 | 21415 | TTTCATAAGATGCTTC | 31 | 1249 |
| 696650 | 21437 | 21452 | AACCTGTAATGTGGGA | 31 | 1250 |
| 696651 | 21442 | 21457 | TAGTCAACCTGTAATG | 9 | 1251 |
| 696652 | 22061 | 22076 | ATTTGAGCATTCAGTT | 18 | 1252 |
| 696653 | 22728 | 22743 | AAAGATGTCTAAGTGC | 25 | 1253 |
| 696654 | 22748 | 22763 | TTACAGTATAAGGAGA | 36 | 1254 |
| 696655 | 22797 | 22812 | GAGAAAGAATGGTCAT | 0 | 1255 |
| 696656 | 23248 | 23263 | AAGAAGCAGGGCTAAC | 10 | 1256 |
| 696657 | 23428 | 23443 | ACTATAAGATTAAGTA | 13 | 1257 |

TABLE 20
Inhibition of K-Ras mRNA by 3-10-3 cEt
gapmers targeting SEQ ID NO: 2

| | SEQ ID | SEQ ID | | | |
|---|---|---|---|---|---|
| | NO: 2 | NO: 2 | | % | SEQ |
| ISIS | Start | Stop | | In- | ID |
| NO | Site | Site | Sequence | hibition | NO |
| 540806 | 45370 | 45385 | GCATGAAGATTTCTGG | 63 | 122 |
| 540806 | 45370 | 45385 | GCATGAAGATTTCTGG | 74 | 122 |
| 663670 | 37371 | 37386 | CTCTCTGCATTGTAAA | 31 | 1258 |
| 663729 | 37497 | 37512 | ACTTACCAGATTACAT | 3 | 1259 |
| 696733 | 34491 | 34506 | GAATTGGAAGCCAATA | 26 | 1260 |
| 696734 | 34493 | 34508 | GAGAATTGGAAGCCAA | 29 | 1261 |
| 696735 | 34496 | 34511 | AGAGAGAATTGGAAGC | 30 | 1262 |
| 696736 | 34502 | 34517 | CAATGCAGAGAGAATT | 1 | 1263 |
| 696737 | 34508 | 34523 | TTCCAGCAATGCAGAG | 1 | 1264 |
| 696738 | 34758 | 34773 | CCAGGTAAAAGCTCAT | 31 | 1265 |
| 696739 | 35416 | 35431 | ATTCTAAGAGCAGTCT | 16 | 1266 |
| 696740 | 35716 | 35731 | TAATTTTTGCATGCAG | 28 | 1267 |
| 696741 | 35718 | 35733 | CTTAATTTTTGCATGC | 22 | 1268 |
| 696742 | 35990 | 36005 | TAAAGCTGGTATATTT | 0 | 1269 |
| 696743 | 36111 | 36126 | AGAAAAGCATACCATC | 34 | 1270 |
| 696744 | 36181 | 36196 | TCCAATCTAGAAAATT | 9 | 1271 |
| 696745 | 36225 | 36240 | ACAATCATATATTGGC | 12 | 1272 |
| 696746 | 36329 | 36344 | TTAGAACAGTGTTCAA | 14 | 1273 |
| 696747 | 36668 | 36683 | ATCCTTACTACAAGTT | 15 | 1274 |
| 696748 | 36798 | 36813 | TACAAGTGAAGCTGAG | 30 | 1275 |
| 696749 | 37039 | 37054 | TTAAAGCCTAAACTGA | 2 | 1276 |
| 696750 | 37045 | 37060 | CTGGAATTAAAGCCTA | 0 | 1277 |
| 696751 | 37258 | 37273 | TTTAAACAGACATCAG | 8 | 1278 |
| 696752 | 37364 | 37379 | CATTGTAAAACACAAC | 1 | 1279 |
| 696753 | 37367 | 37382 | CTGCATTGTAAAACAC | 30 | 1280 |
| 696754 | 37373 | 37388 | CACTCTCTGCATTGTA | 12 | 1281 |
| 696755 | 37493 | 37508 | ACCAGATTACATTATA | 28 | 1282 |
| 696756 | 37495 | 37510 | TTACCAGATTACATTA | 8 | 1283 |
| 696757 | 37499 | 37514 | AAACTTACCAGATTAC | 6 | 1284 |
| 696758 | 37566 | 37581 | AAAGTGGTTGCCACCT | 14 | 1285 |
| 696759 | 37594 | 37609 | AGTTAGAATACTACAC | 7 | 1286 |
| 696760 | 37596 | 37611 | CAAGTTAGAATACTAC | 3 | 1287 |
| 696761 | 37715 | 37730 | ATGCCAAATATAGATT | 17 | 1288 |
| 696762 | 37880 | 37895 | ATATTACTGCTGTCTA | 26 | 1289 |
| 696763 | 37881 | 37896 | AATATTACTGCTGTCT | 11 | 1290 |
| 696764 | 38059 | 38074 | GAAAAGAGGGCGGTAG | 17 | 1291 |
| 696765 | 38181 | 38196 | TGGTAAACCAAATAGG | 35 | 1292 |
| 696766 | 38556 | 38571 | CTATAGCTAAAATGAC | 23 | 1293 |
| 696767 | 38587 | 38602 | CTGCAACACATGTGGA | 6 | 1294 |
| 696768 | 38623 | 38638 | AAAGAGCTGGAGTGGT | 15 | 1295 |
| 696769 | 38886 | 38901 | AAGCATATAATAGTTA | 6 | 1296 |
| 696770 | 38961 | 38976 | ATTCTGGCTAAGATTT | 0 | 1297 |
| 696771 | 39067 | 39082 | GTTTAGAAACGAAAAT | 10 | 1298 |
| 696772 | 39157 | 39172 | ACAAACAATATGCATC | 1 | 1299 |
| 696773 | 39196 | 39211 | CTGTAATTTTATTGCC | 18 | 1300 |
| 696774 | 39341 | 39356 | AGTAGATTAGTACACC | 32 | 1301 |
| 696775 | 39586 | 39601 | ACAATAGGAGGAGAAA | 16 | 1302 |
| 696776 | 39726 | 39741 | AGTCACTGTATAAAAC | 16 | 1303 |
| 696777 | 39750 | 39765 | CAAACAATTGTGACAT | 3 | 1304 |
| 696778 | 39820 | 39835 | AATTACCAAGTATACT | 21 | 1305 |
| 696779 | 40231 | 40246 | CTTTTTCAGGACTAAG | 8 | 1306 |
| 696780 | 40306 | 40321 | CAACCTACACAGAGCA | 9 | 1307 |
| 696781 | 40553 | 40568 | AAAGATTCTAGGCTTA | 11 | 1308 |
| 696782 | 40571 | 40586 | ACTTCCTAAGATTCTG | 5 | 1309 |
| 696783 | 40786 | 40801 | GTGATAGAATCTTAAA | 23 | 1310 |
| 696784 | 40945 | 40960 | AAGGTTTGATTACATA | 11 | 1311 |
| 696785 | 41190 | 41205 | TTTAAGAGAGGTAAAC | 0 | 1312 |
| 696786 | 41301 | 41316 | TACTAAGATTAACGAT | 23 | 1313 |
| 696787 | 41302 | 41317 | CTACTAAGATTAACGA | 7 | 1314 |
| 696788 | 41784 | 41799 | CCACTTTAGGAACAAT | 53 | 1315 |
| 696789 | 41810 | 41825 | CAACACATTAAGTTGT | 0 | 1316 |
| 696790 | 41812 | 41827 | CCCAACACATTAAGTT | 21 | 1317 |
| 696791 | 41844 | 41859 | CTAGACAGCAGAGGGA | 7 | 1318 |
| 696792 | 41994 | 42009 | GTCAATTCTTGTCATG | 34 | 1319 |
| 696793 | 42010 | 42025 | CAAGATCCATACACAA | 17 | 1320 |
| 696794 | 42086 | 42101 | ACCTAATAATCTACAG | 12 | 1321 |
| 696795 | 42094 | 42109 | ACTTTTCAACCTAATA | 0 | 1322 |
| 696796 | 42175 | 42190 | TAGTCATTGTGACCAC | 22 | 1323 |
| 696797 | 42312 | 42327 | TAGCTAAATCATTTGA | 20 | 1324 |
| 696798 | 42339 | 42354 | ACTAATACCTCAGATT | 30 | 1325 |
| 696799 | 42437 | 42452 | TGATATATATTAAGGG | 4 | 1326 |
| 696800 | 42662 | 42677 | ACTTAATTGTCCTTAT | 7 | 1327 |
| 696801 | 42664 | 42679 | ACACTTAATTGTCCTT | 28 | 1328 |
| 696802 | 42736 | 42751 | CTTAATTTGCTACTAT | 10 | 1329 |
| 696803 | 42764 | 42779 | ATAAGGTAACGACTTT | 18 | 1330 |
| 696804 | 42795 | 42810 | GACAAGGATAACCAAT | 18 | 1331 |
| 696805 | 42880 | 42895 | TATATTAGGACTTTTA | 5 | 1332 |
| 696806 | 42986 | 43001 | ATATATACGATGGCTT | 0 | 1333 |
| 696807 | 43412 | 43427 | CTGCATGCACCAAAAG | 15 | 1334 |

### Example 7: Antisense Inhibition of Human K-Ras in Hep3B Cells by cEt Gapmers

[0362] Antisense oligonucleotides were designed targeting a K-Ras nucleic acid and were tested for their effects on K-Ras mRNA in vitro. The antisense oligonucleotides were tested in a series of experiments that had similar culture conditions. The results for each experiment are presented in separate tables shown below. Cultured Hep3B cells at a density of 20,000 cells per well were transfected using electroporation with 2,000 nM antisense oligonucleotide. After a treatment period of approximately 24 hours, RNA was isolated from the cells and K-Ras mRNA levels were measured by quantitative real-time PCR. Human primer probe set RTS3496_MGB was used to measure mRNA levels. K-Ras mRNA levels were adjusted according to total RNA content, as measured by RIBOGREEN®. Results are presented as percent inhibition of K-Ras, relative to untreated control cells. As used herein, a value of ‘0’ indicates that treatment with the antisense oligonucleotide did not inhibit mRNA levels.

[0363] The newly designed chimeric antisense oligonucleotides in the Tables below were designed as 3-10-3 cEt gapmers. The gapmers are 16 nucleosides in length, wherein the central gap segment comprises of ten 2′-deoxynucleosides and is flanked by wing segments on the 5′ direction and the 3′ direction comprising three nucleosides each. Each nucleoside in the 5′ wing segment and each nucleoside in the 3′ wing segment has a cEt sugar modification. The internucleoside linkages throughout each gapmer are phosphorothioate (P═S) linkages. All cytosine residues throughout each gapmer are 5-methylcytosines. “Start site” indicates the 5′-most nucleoside to which the gapmer is targeted in the human gene sequence. “Stop site” indicates the 3′-most nucleoside to which the gapmer is targeted human gene sequence. Each gapmer listed in the Tables below is targeted to either SEQ ID NO: 1 or SEQ ID NO: 2. Certain oligonucleotides are targeted to SEQ ID NO: 3. ‘N/A’ indicates that the antisense oligonucleotide does not target that particular gene sequence with 100% complementarity. In case the sequence alignment for a target gene in a particular table is not shown, it is understood that none of the oligonucleotides presented in that table align with 100% complementarity with that target gene.

TABLE 21
Inhibition of K-Ras mRNA by 3-10-3 cEt gapmers targeting
SEQ ID NO: 1 and 2

| | SEQ ID | SEQ ID | SEQ ID | SEQ ID | | | |
|---|---|---|---|---|---|---|---|
| | NO: 1 | NO: 1 | NO: 2 | NO: 2 | | | SEQ |
| ISIS | Start | Stop | Start | Stop | | % | ID |
| NO | Site | Site | Site | Site | Sequence | Inhibition | NO |
| 540806 | 2981 | 2996 | 45370 | 45385 | GCATGAAGATTTCTGG | 76 | 122 |
| 651672 | 2941 | 2956 | 45330 | 45345 | CTGTTACCAGGAGTAG | 75 | 1335 |
| 651675 | 2949 | 2964 | 45338 | 45353 | ATGTATTACTGTTACC | 72 | 1336 |
| 651677 | 2976 | 2991 | 45365 | 45380 | AAGATTTCTGGTTACT | 57 | 1337 |
| 651678 | 2978 | 2993 | 45367 | 45382 | TGAAGATTTCTGGTTA | 52 | 1338 |
| 651679 | 2980 | 2995 | 45369 | 45384 | CATGAAGATTTCTGGT | 51 | 1339 |
| 651681 | 2984 | 2999 | 45373 | 45388 | ATTGCATGAAGATTTC | 60 | 1340 |
| 651691 | 3379 | 3394 | 45768 | 45783 | ATTATGTCTCTTGTTT | 39 | 1341 |
| 651696 | 3481 | 3496 | 45870 | 45885 | CTTCTTTGCAAAACTA | 62 | 1342 |
| 651707 | 3622 | 3637 | 46011 | 46026 | ACAGTTATGCCAAATA | 67 | 1343 |
| 651708 | 3624 | 3639 | 46013 | 46028 | TCACAGTTATGCCAAA | 58 | 1344 |
| 651709 | 3626 | 3641 | 46015 | 46030 | AATCACAGTTATGCCA | 44 | 1345 |
| 651711 | 3630 | 3645 | 46019 | 46034 | AAAGAATCACAGTTAT | 17 | 1346 |
| 651712 | 3632 | 3647 | 46021 | 46036 | TAAAAGAATCACAGTT | 24 | 1347 |
| 651713 | 3642 | 3657 | 46031 | 46046 | GTAATTGTCCTAAAAG | 19 | 1348 |
| 651724 | 3786 | 3801 | 46175 | 46190 | TGTGAACTAGTTCAGG | 59 | 1349 |
| 651726 | 3800 | 3815 | 46189 | 46204 | GAAGTTTCCTTGTCTG | 68 | 1350 |
| 651732 | 3891 | 3906 | 46280 | 46295 | TACTGTGTAAGTCTTA | 60 | 1351 |
| 651733 | 3893 | 3908 | 46282 | 46297 | GGTACTGTGTAAGTCT | 76 | 1352 |
| 651734 | 3895 | 3910 | 46284 | 46299 | GAGGTACTGTGTAAGT | 58 | 1353 |
| 651736 | 3899 | 3914 | 46288 | 46303 | AAACGAGGTACTGTGT | 36 | 1354 |
| 651739 | 3939 | 3954 | 46328 | 46343 | CTGCAGTTCCTGAAGT | 17 | 1355 |
| 651741 | 3943 | 3958 | 46332 | 46347 | AGCACTGCAGTTCCTG | 72 | 1356 |
| 651742 | 3945 | 3960 | 46334 | 46349 | TAAGCACTGCAGTTCC | 65 | 1357 |
| 651743 | 3947 | 3962 | 46336 | 46351 | CATAAGCACTGCAGTT | 27 | 1358 |
| 652079 | 2925 | 2940 | 45314 | 45329 | TCCTAGTTATAGATTA | 44 | 1359 |
| 652080 | 2934 | 2949 | 45323 | 45338 | CAGGAGTAGTCCTAGT | 39 | 1360 |
| 652081 | 2962 | 2977 | 45351 | 45366 | CTAAAACAATGGAATG | 12 | 1361 |
| 652082 | 3004 | 3019 | 45393 | 45408 | CATGAATTAAAGTATT | 0 | 1362 |
| 652083 | 3013 | 3028 | 45402 | 45417 | AGTAAGCTTCATGAAT | 19 | 1363 |
| 652084 | 3038 | 3053 | 45427 | 45442 | CGAGACTCTGACACCA | 35 | 1364 |
| 652085 | 3271 | 3286 | 45660 | 45675 | GTTTATGAGGCCAAGG | 50 | 1365 |
| 652086 | 3280 | 3295 | 45669 | 45684 | GCAAAACAGGTTTATG | 59 | 1366 |
| 652087 | 3289 | 3304 | 45678 | 45693 | ATGAGTTCTGCAAAAC | 63 | 1367 |
| 652088 | 3325 | 3340 | 45714 | 45729 | CATCTGGTAGGCACTC | 62 | 1368 |
| 652089 | 3351 | 3366 | 45740 | 45755 | TACCCAGTGCCTTGTG | 15 | 1369 |
| 652090 | 3360 | 3375 | 45749 | 45764 | GATACCATATACCCAG | 64 | 1370 |
| 652091 | 3393 | 3408 | 45782 | 45797 | ACCTAAGGACCGGGAT | 30 | 1371 |
| 652092 | 3403 | 3418 | 45792 | 45807 | CACTAGCACTACCTAA | 8 | 1372 |
| 652093 | 3421 | 3436 | 45810 | 45825 | GTAAGATATTACAGAC | 56 | 1373 |
| 652094 | 3434 | 3449 | 45823 | 45838 | ACCAAAGGCCTTAGTA | 29 | 1374 |
| 652095 | 3469 | 3484 | 45858 | 45873 | ACTAAAATACGCATCG | 66 | 1375 |
| 652096 | 3490 | 3505 | 45879 | 45894 | ACCAAACCCCTTCTTT | 7 | 1376 |
| 652097 | 3500 | 3515 | 45889 | 45904 | TGGCACAGAGACCAAA | 8 | 1377 |
| 652098 | 3509 | 3524 | 45898 | 45913 | TTATAGAGCTGGCACA | 23 | 1378 |
| 652099 | 3518 | 3533 | 45907 | 45922 | GCAAAACAATTATAGA | 15 | 1379 |
| 652100 | 3538 | 3553 | 45927 | 45942 | AGAGTTTCAGTGGAAT | 74 | 1380 |
| 652101 | 3547 | 3562 | 45936 | 45951 | CTTGATCGAAGAGTTT | 73 | 1381 |
| 652102 | 3556 | 3571 | 45945 | 45960 | ATAAAGTAGCTTGATC | 31 | 1382 |
| 652103 | 3566 | 3581 | 45955 | 45970 | AGTGATTTACATAAAG | 38 | 1383 |
| 652104 | 3591 | 3606 | 45980 | 45995 | CAAGTTTATTCCTTTA | 57 | 1384 |
| 652105 | 3600 | 3615 | 45989 | 46004 | CAATATAATCAAGTTT | 0 | 1385 |
| 652106 | 3651 | 3666 | 46040 | 46055 | ATGTGTACAGTAATTG | 40 | 1386 |
| 652107 | 3661 | 3676 | 46050 | 46065 | ATACACCTTAATGTGT | 0 | 1387 |
| 652108 | 3678 | 3693 | 46067 | 46082 | CAATATGAATATCTGA | 17 | 1388 |
| 652109 | 3694 | 3709 | 46083 | 46098 | TATTACACATTTGGGT | 35 | 1389 |
| 652110 | 3703 | 3718 | 46092 | 46107 | AAACTGGAATATTACA | 16 | 1390 |
| 652111 | 3713 | 3728 | 46102 | 46117 | TATGCAGAGAAAACTG | 37 | 1391 |
| 652112 | 3722 | 3737 | 46111 | 46126 | TTAATTACTTATGCAG | 44 | 974 |
| 652113 | 3750 | 3765 | 46139 | 46154 | GATAAAACTATTAATT | 0 | 1392 |
| 652114 | 3759 | 3774 | 46148 | 46163 | TTGTACCCAGATAAAA | 21 | 1393 |
| 652115 | 3770 | 3785 | 46159 | 46174 | CACCTGTTTATTTGTA | 36 | 1394 |
| 652116 | 3809 | 3824 | 46198 | 46213 | TTTTACATAGAAGTTT | 24 | 1395 |
| 652117 | 3818 | 3833 | 46207 | 46222 | CATAGTGATTTTTACA | 43 | 1396 |
| 652118 | 3827 | 3842 | 46216 | 46231 | TTCAGAAATCATAGTG | 60 | 1397 |
| 652119 | 3839 | 3854 | 46228 | 46243 | TTCACATAGCAATTCA | 63 | 1398 |
| 652120 | 3848 | 3863 | 46237 | 46252 | ATCTGTAGTTTCACAT | 51 | 1399 |
| 652121 | 3857 | 3872 | 46246 | 46261 | GTTCCAAAGATCTGTA | 65 | 1400 |
| 652122 | 3876 | 3891 | 46265 | 46280 | AACACCCTACCTAAAC | 10 | 1401 |
| 652123 | 3931 | 3946 | 46320 | 46335 | CCTGAAGTATGGCCAT | 64 | 1402 |
| 652124 | 3959 | 3974 | 46348 | 46363 | TAAATATCCCCTCATA | 10 | 1403 |
| 652125 | 3968 | 3983 | 46357 | 46372 | CAAGAGGCCTAAATAT | 12 | 1404 |
| 652126 | 3977 | 3992 | 46366 | 46381 | TCAAAAATTCAAGAGG | 36 | 1405 |
| 652127 | 3986 | 4001 | 46375 | 46390 | CCATCTACATCAAAAA | 26 | 1406 |
| 652128 | 3995 | 4010 | 46384 | 46399 | AAAAAATGCCCATCTA | 21 | 1407 |
| 652129 | 4006 | 4021 | 46395 | 46410 | CCACTACCTTAAAAAA | 5 | 1408 |
| 652130 | 4018 | 4033 | 46407 | 46422 | AAAGGTAATTAACCAC | 0 | 1409 |
| 652131 | 4027 | 4042 | 46416 | 46431 | AGTTCACATAAAGGTA | 69 | 1410 |

TABLE 22
Inhibition of K-Ras mRNA by 3-10-3 cEt gapmers targeting
SEQ ID NO: 1 and 2

| | SEQ ID | SEQ ID | SEQ ID | SEQ ID | | | |
|---|---|---|---|---|---|---|---|
| | NO: 1 | NO: 1 | NO: 2 | NO: 2 | | | SEQ |
| ISIS | Start | Stop | Start | Stop | | % | ID |
| NO | Site | Site | Site | Site | Sequence | Inhibition | NO |
| 540806 | 2981 | 2996 | 45370 | 45385 | GCATGAAGATTTCTGG | 77 | 122 |
| 540832 | 4277 | 4292 | 46666 | 46681 | ATGCAGTGTGACTCAG | 56 | 135 |
| 540834 | 4279 | 4294 | 46668 | 46683 | CTATGCAGTGTGACTC | 50 | 136 |
| 540836 | 4338 | 4353 | 46727 | 46742 | CAAAATTGTGCAATGG | 52 | 137 |
| 540839 | 4343 | 4358 | 46732 | 46747 | TAGGACAAAATTGTGC | 42 | 64 |
| 540846 | 4579 | 4594 | 46968 | 46983 | AAGGTAACTGCTGGGT | 69 | 67 |
| 651757 | 4267 | 4282 | 46656 | 46671 | ACTCAGTTAAATAGAG | 2 | 1411 |
| 651759 | 4273 | 4288 | 46662 | 46677 | AGTGTGACTCAGTTAA | 64 | 970 |
| 651760 | 4274 | 4289 | 46663 | 46678 | CAGTGTGACTCAGTTA | 72 | 971 |
| 651762 | 4280 | 4295 | 46669 | 46684 | CCTATGCAGTGTGACT | 51 | 1412 |
| 651763 | 4281 | 4296 | 46670 | 46685 | TCCTATGCAGTGTGAC | 48 | 1413 |
| 651764 | 4283 | 4298 | 46672 | 46687 | ATTCCTATGCAGTGTG | 55 | 1414 |
| 651765 | 4287 | 4302 | 46676 | 46691 | CTAAATTCCTATGCAG | 30 | 1415 |
| 651768 | 4308 | 4323 | 46697 | 46712 | ATAACCTATAAAAGTT | 8 | 1416 |
| 651771 | 4340 | 4355 | 46729 | 46744 | GACAAAATTGTGCAAT | 27 | 1417 |
| 651772 | 4342 | 4357 | 46731 | 46746 | AGGACAAAATTGTGCA | 60 | 1418 |
| 651773 | 4344 | 4359 | 46733 | 46748 | TTAGGACAAAATTGTG | 28 | 1419 |
| 651774 | 4346 | 4361 | 46735 | 46750 | TATTAGGACAAAATTG | 0 | 1420 |
| 651775 | 4348 | 4363 | 46737 | 46752 | TATATTAGGACAAAAT | 0 | 1421 |
| 651780 | 4472 | 4487 | 46861 | 46876 | CCCTAAAAAAAGTTAT | 3 | 1422 |
| 651786 | 4574 | 4589 | 46963 | 46978 | AACTGCTGGGTTCTAA | 34 | 1423 |
| 651787 | 4576 | 4591 | 46965 | 46980 | GTAACTGCTGGGTTCT | 49 | 1424 |
| 651790 | 4582 | 4597 | 46971 | 46986 | TTTAAGGTAACTGCTG | 41 | 1425 |
| 651796 | 4626 | 4641 | 47015 | 47030 | TGCTATCCAGTATTAA | 46 | 1426 |
| 651800 | 4731 | 4746 | 47120 | 47135 | TCTTAATCTAGTTATG | 3 | 1427 |
| 651801 | 4761 | 4776 | 47150 | 47165 | GCACTTCAAACTATTA | 70 | 1428 |
| 651808 | 4893 | 4908 | 47282 | 47297 | ACTTTCGGATAAAACA | 19 | 1429 |
| 652132 | 4036 | 4051 | 46425 | 46440 | ACCATTCAAAGTTCAC | 73 | 975 |
| 652133 | 4046 | 4061 | 46435 | 46450 | CTTTTGTTAAACCATT | 42 | 1430 |
| 652134 | 4071 | 4086 | 46460 | 46475 | CTTTAAAATCTCTACA | 0 | 1431 |
| 652135 | 4080 | 4095 | 46469 | 46484 | ATTCTCCCCCTTTAAA | 15 | 1432 |
| 652136 | 4112 | 4127 | 46501 | 46516 | GCTGTAATAATTAGGT | 52 | 1433 |
| 652137 | 4121 | 4136 | 46510 | 46525 | GTCTTTAAGGCTGTAA | 41 | 1434 |
| 652138 | 4134 | 4149 | 46523 | 46538 | AACAAGGATTTTTGTC | 0 | 1435 |
| 652139 | 4143 | 4158 | 46532 | 46547 | AAAAACTTCAACAAGG | 34 | 1436 |
| 652140 | 4172 | 4187 | 46561 | 46576 | CTAAGTCTATGTAATT | 0 | 1437 |
| 652141 | 4181 | 4196 | 46570 | 46585 | TGTTAATGCCTAAGTC | 21 | 1438 |
| 652142 | 4190 | 4205 | 46579 | 46594 | CCACAAACATGTTAAT | 12 | 1439 |
| 652143 | 4200 | 4215 | 46589 | 46604 | CTATATTCTTCCACAA | 43 | 1440 |
| 652144 | 4225 | 4240 | 46614 | 46629 | ACTCAAATGATACAAT | 0 | 1441 |
| 652145 | 4249 | 4264 | 46638 | 46653 | TAGAATGCCTACTTGG | 30 | 1442 |
| 652146 | 4298 | 4313 | 46687 | 46702 | AAAGTTAGGTTCTAAA | 4 | 1443 |
| 652147 | 4317 | 4332 | 46706 | 46721 | ACAGTTTTGATAACCT | 57 | 1444 |
| 652148 | 4327 | 4342 | 46716 | 46731 | AATGGTGACAACAGTT | 58 | 1445 |
| 652149 | 4374 | 4389 | 46763 | 46778 | AACATGCCCCACAAAG | 20 | 1446 |
| 652150 | 4383 | 4398 | 46772 | 46787 | CTGTAACTTAACATGC | 28 | 1447 |
| 652151 | 4403 | 4418 | 46792 | 46807 | ATGAGATGAACTTGTG | 60 | 1448 |
| 652152 | 4412 | 4427 | 46801 | 46816 | GGAATACAAATGAGAT | 43 | 1449 |
| 652153 | 4461 | 4476 | 46850 | 46865 | GTTATATACTGTTTGA | 59 | 1450 |
| 652154 | 4496 | 4511 | 46885 | 46900 | GTTTTTGCTGTCTAAA | 53 | 1451 |
| 652155 | 4505 | 4520 | 46894 | 46909 | CTTCAGATAGTTTTTG | 39 | 1452 |
| 652156 | 4514 | 4529 | 46903 | 46918 | AATGGAAATCTTCAGA | 49 | 1453 |
| 652157 | 4524 | 4539 | 46913 | 46928 | CTTTTTGACAAATGGA | 71 | 976 |
| 652158 | 4537 | 4552 | 46926 | 46941 | CAAGAAATCATTACTT | 0 | 1454 |
| 652159 | 4551 | 4566 | 46940 | 46955 | TACTACACAATTATCA | 20 | 1455 |
| 652160 | 4561 | 4576 | 46950 | 46965 | TAAAAAACATTACTAC | 0 | 1456 |
| 652161 | 4606 | 4621 | 46995 | 47010 | GAAGTTACTAAATATA | 0 | 1457 |
| 652162 | 4615 | 4630 | 47004 | 47019 | ATTAACACAGAAGTTA | 22 | 1458 |
| 652163 | 4635 | 4650 | 47024 | 47039 | CAGAATTCATGCTATC | 64 | 1459 |
| 652164 | 4647 | 4662 | 47036 | 47051 | AGTTTCTCAATGCAGA | 32 | 1460 |
| 652165 | 4660 | 4675 | 47049 | 47064 | ATGACAGCTATTCAGT | 47 | 1461 |
| 652166 | 4670 | 4685 | 47059 | 47074 | GTTTCATTTTATGACA | 36 | 1462 |
| 652167 | 4681 | 4696 | 47070 | 47085 | TTAGAAAGAAAGTTTC | 0 | 1463 |
| 652168 | 4693 | 4708 | 47082 | 47097 | GAGTATCTTTCTTTAG | 28 | 1464 |
| 652169 | 4702 | 4717 | 47091 | 47106 | AACTCATGTGAGTATC | 54 | 1465 |
| 652170 | 4711 | 4726 | 47100 | 47115 | TTCTTCAAGAACTCAT | 44 | 1466 |
| 652171 | 4722 | 4737 | 47111 | 47126 | AGTTATGACTATTCTT | 31 | 1467 |
| 652172 | 4740 | 4755 | 47129 | 47144 | AAACACAGATCTTAAT | 0 | 1468 |
| 652173 | 4752 | 4767 | 47141 | 47156 | ACTATTAAACTAAAAC | 8 | 1469 |
| 652174 | 4770 | 4785 | 47159 | 47174 | CCCAAACAGGCACTTC | 62 | 1470 |
| 652175 | 4779 | 4794 | 47168 | 47183 | TATCATTATCCCAAAC | 4 | 1471 |
| 652176 | 4788 | 4803 | 47177 | 47192 | TAAATTACCTATCATT | 0 | 1472 |
| 652177 | 4800 | 4815 | 47189 | 47204 | CCTAAATTCATCTAAA | 0 | 1473 |
| 652178 | 4821 | 4836 | 47210 | 47225 | CTGCAGATAACTTTTT | 12 | 1474 |
| 652179 | 4831 | 4846 | 47220 | 47235 | CTCAACATATCTGCAG | 9 | 1475 |
| 652180 | 4877 | 4892 | 47266 | 47281 | CTGTAACCCAGTTAGC | 43 | 1476 |
| 652181 | 4902 | 4917 | 47291 | 47306 | GAATTGGAAACTTTCG | 29 | 1477 |
| 652182 | 4915 | 4930 | 47304 | 47319 | ACACAAGACAGTGGAA | 36 | 1478 |

TABLE 23
Inhibition of K-Ras mRNA by 3-10-3 cEt gapmers targeting
SEQ ID NO: 1 and 2

| | SEQ ID | SEQ ID | SEQ ID | SEQ ID | | | |
|---|---|---|---|---|---|---|---|
| | NO: 1 | NO: 1 | NO: 2 | NO: 2 | | | SEQ |
| ISIS | Start | Stop | Start | Stop | | % | ID |
| NO | Site | Site | Site | Site | Sequence | Inhibition | NO |
| 540806 | 2981 | 2996 | 45370 | 45385 | GCATGAAGATTTCTGG | 78 | 122 |
| 651824 | 5227 | 5242 | 47616 | 47631 | CAAATTTTAGATCACT | 5 | 1479 |
| 651827 | N/A | N/A | 37388 | 37403 | ATAAAAAGCATCCTCC | 27 | 1480 |
| 651831 | N/A | N/A | 37463 | 37478 | TTTCACACAGCCAGGA | 34 | 1481 |
| 652183 | 4971 | 4986 | 47360 | 47375 | TACTAGTAAGAAATTG | 9 | 1482 |
| 652184 | 4980 | 4995 | 47369 | 47384 | AAGAAATAGTACTAGT | 26 | 1483 |
| 652185 | 5013 | 5028 | 47402 | 47417 | GTTAAAATACATTCCA | 42 | 1484 |
| 652186 | 5028 | 5043 | 47417 | 47432 | CACTATACAAAAATAG | 4 | 1485 |
| 652187 | 5037 | 5052 | 47426 | 47441 | TTCAGTTTACACTATA | 45 | 1486 |
| 652188 | 5048 | 5063 | 47437 | 47452 | AATGTGCATGTTTCAG | 46 | 1487 |
| 652189 | 5061 | 5076 | 47450 | 47465 | GCACAATGTACAAAAT | 11 | 1488 |
| 652190 | 5076 | 5091 | 47465 | 47480 | GTCCCACAAAAGAAAG | 18 | 1489 |
| 652191 | 5097 | 5112 | 47486 | 47501 | CAACTGGATCACACTG | 27 | 1490 |
| 652192 | 5108 | 5123 | 47497 | 47512 | ATGATGGAAAACAACT | 19 | 1491 |
| 652193 | 5118 | 5133 | 47507 | 47522 | GCGCAACCAAATGATG | 12 | 1492 |
| 652194 | 5137 | 5152 | 47526 | 47541 | GACCAACATTCCTAGG | 24 | 1493 |
| 652195 | 5146 | 5161 | 47535 | 47550 | GTTTGATATGACCAAC | 33 | 1494 |
| 652196 | 5159 | 5174 | 47548 | 47563 | GGTCATTTTTAATGTT | 30 | 1495 |
| 652197 | 5168 | 5183 | 47557 | 47572 | TAAAAGAGTGGTCATT | 0 | 1496 |
| 652198 | 5200 | 5215 | 47589 | 47604 | ACTCCTATAAACATTT | 22 | 1497 |
| 652199 | 5209 | 5224 | 47598 | 47613 | ACAGCACATACTCCTA | 49 | 1498 |
| 652200 | 5218 | 5233 | 47607 | 47622 | GATCACTTCACAGCAC | 41 | 1499 |
| 652201 | 5249 | 5264 | 47638 | 47653 | ACAGTTCATGACAAAA | 40 | 1500 |
| 652202 | 5259 | 5274 | 47648 | 47663 | TAGGAGTAGTACAGTT | 17 | 1501 |
| 652203 | 5268 | 5283 | 47657 | 47672 | TACAATAATTAGGAGT | 4 | 1502 |
| 652206 | N/A | N/A | 37417 | 37432 | CTGTATTGTCGGATCT | 62 | 1503 |
| 652207 | N/A | N/A | 37430 | 37445 | GATTTTTTTCAATCTG | 36 | 1504 |
| 652208 | N/A | N/A | 37486 | 37501 | TACATTATAATGCATT | 21 | 1505 |
| 652209 | N/A | N/A | 2653 | 2668 | ATGCAGCAGGGAAGGC | 6 | 1506 |
| 652210 | N/A | N/A | 4249 | 4264 | TCCAAAGGAGTCTTAC | 47 | 1507 |
| 652211 | N/A | N/A | 7796 | 7811 | GAAACCCAAGGTACAT | 67 | 1508 |
| 652212 | N/A | N/A | 8388 | 8403 | CTCCATGACCTTCAAG | 49 | 1509 |
| 652213 | N/A | N/A | 9042 | 9057 | AGGCAGTCTACTTCAA | 44 | 1510 |
| 652214 | N/A | N/A | 9464 | 9479 | CCAAATAAAGGCTTAA | 0 | 1511 |
| 652215 | N/A | N/A | 10358 | 10373 | TACAAGTAAAGGTGAT | 27 | 1512 |
| 652216 | N/A | N/A | 10751 | 10766 | GAACTGAATTATAAGT | 31 | 1513 |
| 652217 | N/A | N/A | 11315 | 11330 | TATCAAGGTTTGGATC | 37 | 1514 |
| 652218 | N/A | N/A | 11502 | 11517 | TAAAATTGCTGTGTGT | 37 | 1515 |
| 652219 | N/A | N/A | 11687 | 11702 | ATCAATCATATAAGAC | 45 | 1516 |
| 652220 | N/A | N/A | 12032 | 12047 | TCACAACTATTCTACA | 15 | 1517 |
| 652221 | N/A | N/A | 12408 | 12423 | CTAGAGATACCTAAAA | 11 | 1518 |
| 652222 | N/A | N/A | 13439 | 13454 | AATCTATGTTACTTAG | 19 | 1519 |
| 652223 | N/A | N/A | 13991 | 14006 | CAAAGGACATGTAGTT | 35 | 1520 |
| 652224 | N/A | N/A | 14347 | 14362 | AGCCCAATGGTATAAG | 20 | 1521 |
| 652225 | N/A | N/A | 14965 | 14980 | ATCACAGGGAAGGATA | 6 | 1522 |
| 652226 | N/A | N/A | 15751 | 15766 | AATAATCAGAGTGGAC | 20 | 1523 |
| 652227 | N/A | N/A | 16942 | 16957 | ACAGGAGCTAAGGCAA | 13 | 1524 |
| 652228 | N/A | N/A | 17144 | 17159 | AACTTTTCCGGCATCA | 23 | 1525 |
| 652229 | N/A | N/A | 17450 | 17465 | TGAAAATCTAGGTGTC | 31 | 1526 |
| 652230 | N/A | N/A | 17739 | 17754 | AGTATTGTAAGGACTT | 41 | 1527 |
| 652231 | N/A | N/A | 17984 | 17999 | TAACTTTTACTAAAGG | 4 | 1528 |
| 652232 | N/A | N/A | 18104 | 18119 | ACTCAGGCAGTGACTC | 38 | 1529 |
| 652233 | N/A | N/A | 18935 | 18950 | ATGTAACAGTGTGCAA | 41 | 1530 |
| 652234 | N/A | N/A | 18964 | 18979 | GAATGTTCACGACAAA | 58 | 1531 |
| 652235 | N/A | N/A | 19258 | 19273 | AATTGTTTAAGTCTAT | 1 | 1532 |
| 652236 | N/A | N/A | 19785 | 19800 | GTCCATGATAACTATT | 37 | 1533 |
| 652237 | N/A | N/A | 21645 | 21660 | GTACAGATTGGCCAGG | 32 | 1534 |
| 652238 | N/A | N/A | 25871 | 25886 | ACTCCACTGCTCTAAT | 8 | 1535 |
| 652239 | N/A | N/A | 26391 | 26406 | ACTAGACTATACAGTA | 7 | 1536 |
| 652240 | N/A | N/A | 26720 | 26735 | CTAGAAAGATTTTGAT | 0 | 1537 |
| 652241 | N/A | N/A | 31136 | 31151 | AAGTTAGGGCATAAAA | 17 | 1538 |
| 652242 | N/A | N/A | 31818 | 31833 | TATTAAAGTTAGCCTG | 34 | 1539 |
| 652243 | N/A | N/A | 33116 | 33131 | GTTCAAAATATTGATC | 18 | 1540 |
| 652244 | N/A | N/A | 33201 | 33216 | AAAAACCACTACTTGG | 22 | 1541 |
| 652245 | N/A | N/A | 34689 | 34704 | AAGTTATAATGTCAAT | 6 | 1542 |
| 652246 | N/A | N/A | 35767 | 35782 | ACAGAGAATTGGCAAC | 48 | 1543 |
| 652247 | N/A | N/A | 35770 | 35785 | CACACAGAGAATTGGC | 71 | 1544 |
| 652248 | N/A | N/A | 35803 | 35818 | CACCAGTACCATTTGC | 36 | 1545 |
| 652249 | N/A | N/A | 36056 | 36071 | ATATATAGTGCAAATT | 15 | 1546 |
| 652250 | N/A | N/A | 36325 | 36340 | AACAGTGTTCAATCAT | 57 | 1547 |
| 652251 | N/A | N/A | 36875 | 36890 | TCTCAAAGGTGAGTCA | 41 | 1548 |
| 652252 | N/A | N/A | 37321 | 37336 | AGTAATTTACTGGGAA | 35 | 1549 |
| 652253 | N/A | N/A | 38872 | 38887 | TAAGAATAGTATTCTG | 2 | 1550 |
| 652254 | N/A | N/A | 41315 | 41330 | CTCCTTTACTGTACTA | 23 | 1551 |
| 652255 | N/A | N/A | 42293 | 42308 | GTCTTATAGTTTACCA | 55 | 1552 |
| 652256 | N/A | N/A | 42551 | 42566 | GTAAAATCCATTGGAT | 15 | 1553 |

TABLE 24
Inhibition of K-Ras mRNA by 3-10-3 cEt gapmers targeting
SEQ ID NO: 1 and 2

| | SEQ ID | SEQ ID | SEQ ID | | | | |
|---|---|---|---|---|---|---|---|
| | NO: 1 | NO: 1 | NO: 2 | SEQ ID | | | SEQ |
| ISIS | Start | Stop | Start | 2: Stop | | % | ID |
| NO | Site | Site | Site | Site | Sequence | Inhibition | NO |
| 540806 | 2981 | 2996 | 45370 | 45385 | GCATGAAGATTTCTGG | 74 | 122 |
| 540806 | 2981 | 2996 | 45370 | 45385 | GCATGAAGATTTCTGG | 85 | 122 |
| 651666 | 2855 | 2870 | 45244 | 45259 | GTTCTGTCTATTCATA | 43 | 912 |
| 651673 | 2943 | 2958 | 45332 | 45347 | TACTGTTACCAGGAGT | 44 | 1554 |
| 651674 | 2945 | 2960 | 45334 | 45349 | ATTACTGTTACCAGGA | 69 | 1555 |
| 651676 | 2965 | 2980 | 45354 | 45369 | TTACTAAAACAATGGA | 14 | 1556 |
| 651683 | 3008 | 3023 | 45397 | 45412 | GCTTCATGAATTAAAG | 23 | 1557 |
| 651692 | 3381 | 3396 | 45770 | 45785 | GGATTATGTCTCTTGT | 68 | 1558 |
| 651693 | 3400 | 3415 | 45789 | 45804 | TAGCACTACCTAAGGA | 2 | 1559 |
| 696162 | 2829 | 2844 | 45218 | 45233 | AAAATCCTACTGTCGC | 50 | 1560 |
| 696163 | 2835 | 2850 | 45224 | 45239 | GTTTGAAAAATCCTAC | 12 | 1561 |
| 696164 | 2838 | 2853 | 45227 | 45242 | CAGGTTTGAAAAATCC | 57 | 1562 |
| 696165 | 2843 | 2858 | 45232 | 45247 | CATACCAGGTTTGAAA | 37 | 1563 |
| 696166 | 2845 | 2860 | 45234 | 45249 | TTCATACCAGGTTTGA | 50 | 1564 |
| 696167 | 2850 | 2865 | 45239 | 45254 | GTCTATTCATACCAGG | 79 | 925 |
| 696168 | 2860 | 2875 | 45249 | 45264 | ATAGGGTTCTGTCTAT | 5 | 1565 |
| 696169 | 2866 | 2881 | 45255 | 45270 | CACTGGATAGGGTTCT | 51 | 1566 |
| 696170 | 2869 | 2884 | 45258 | 45273 | TTCCACTGGATAGGGT | 31 | 1567 |
| 696171 | 2871 | 2886 | 45260 | 45275 | CCTTCCACTGGATAGG | 3 | 1568 |
| 696172 | 2876 | 2891 | 45265 | 45280 | ATTCTCCTTCCACTGG | 42 | 1569 |
| 696173 | 2892 | 2907 | 45281 | 45296 | GCACTATCTTTATTAA | 19 | 1570 |
| 696174 | 2898 | 2913 | 45287 | 45302 | CTTTCAGCACTATCTT | 48 | 1571 |
| 696175 | 2900 | 2915 | 45289 | 45304 | TTCTTTCAGCACTATC | 51 | 1572 |
| 696176 | 2903 | 2918 | 45292 | 45307 | GAATTCTTTCAGCACT | 73 | 1573 |
| 696177 | 2909 | 2924 | 45298 | 45313 | CCTAAGGAATTCTTTC | 42 | 1574 |
| 696178 | 2911 | 2926 | 45300 | 45315 | TACCTAAGGAATTCTT | 33 | 1575 |
| 696179 | 2913 | 2928 | 45302 | 45317 | ATTACCTAAGGAATTC | 21 | 1576 |
| 696180 | 2917 | 2932 | 45306 | 45321 | ATAGATTACCTAAGGA | 37 | 1577 |
| 696181 | 2919 | 2934 | 45308 | 45323 | TTATAGATTACCTAAG | 14 | 1578 |
| 696182 | 2921 | 2936 | 45310 | 45325 | AGTTATAGATTACCTA | 10 | 1579 |
| 696183 | 2923 | 2938 | 45312 | 45327 | CTAGTTATAGATTACC | 34 | 1580 |
| 696184 | 2927 | 2942 | 45316 | 45331 | AGTCCTAGTTATAGAT | 35 | 1581 |
| 696185 | 2930 | 2945 | 45319 | 45334 | AGTAGTCCTAGTTATA | 44 | 1582 |
| 696186 | 2935 | 2950 | 45324 | 45339 | CCAGGAGTAGTCCTAG | 42 | 1583 |
| 696187 | 2936 | 2951 | 45325 | 45340 | ACCAGGAGTAGTCCTA | 62 | 1584 |
| 696188 | 2937 | 2952 | 45326 | 45341 | TACCAGGAGTAGTCCT | 45 | 1585 |
| 696189 | 2938 | 2953 | 45327 | 45342 | TTACCAGGAGTAGTCC | 46 | 1586 |
| 696190 | 2940 | 2955 | 45329 | 45344 | TGTTACCAGGAGTAGT | 35 | 1587 |
| 696191 | 2942 | 2957 | 45331 | 45346 | ACTGTTACCAGGAGTA | 29 | 1588 |
| 696192 | 2946 | 2961 | 45335 | 45350 | TATTACTGTTACCAGG | 68 | 1589 |
| 696193 | 2951 | 2966 | 45340 | 45355 | GAATGTATTACTGTTA | 56 | 1590 |
| 696194 | 2954 | 2969 | 45343 | 45358 | ATGGAATGTATTACTG | 52 | 1591 |
| 696195 | 2967 | 2982 | 45356 | 45371 | GGTTACTAAAACAATG | 27 | 1592 |
| 696196 | 2969 | 2984 | 45358 | 45373 | CTGGTTACTAAAACAA | 42 | 1593 |
| 696197 | 2973 | 2988 | 45362 | 45377 | ATTTCTGGTTACTAAA | 18 | 1594 |
| 696198 | 2983 | 2998 | 45372 | 45387 | TTGCATGAAGATTTCT | 59 | 1595 |
| 696199 | 2987 | 3002 | 45376 | 45391 | TTCATTGCATGAAGAT | 40 | 1596 |
| 696200 | 2989 | 3004 | 45378 | 45393 | TTTTCATTGCATGAAG | 39 | 1597 |
| 696201 | 3011 | 3026 | 45400 | 45415 | TAAGCTTCATGAATTA | 19 | 1598 |
| 696202 | 3273 | 3288 | 45662 | 45677 | AGGTTTATGAGGCCAA | 36 | 1599 |
| 696203 | 3276 | 3291 | 45665 | 45680 | AACAGGTTTATGAGGC | 50 | 1600 |
| 696204 | 3285 | 3300 | 45674 | 45689 | GTTCTGCAAAACAGGT | 64 | 1601 |
| 696205 | 3287 | 3302 | 45676 | 45691 | GAGTTCTGCAAAACAG | 57 | 1602 |
| 696206 | 3342 | 3357 | N/A | N/A | CCTTGTGCGGTGACTG | 11 | 1603 |
| 696207 | 3354 | 3369 | 45743 | 45758 | ATATACCCAGTGCCTT | 14 | 1604 |
| 696208 | 3356 | 3371 | 45745 | 45760 | CCATATACCCAGTGCC | 55 | 1605 |
| 696209 | 3358 | 3373 | 45747 | 45762 | TACCATATACCCAGTG | 47 | 1606 |
| 696210 | 3383 | 3398 | 45772 | 45787 | CGGGATTATGTCTCTT | 69 | 1607 |
| 696211 | 3390 | 3405 | 45779 | 45794 | TAAGGACCGGGATTAT | 19 | 1608 |
| 696212 | 3395 | 3410 | 45784 | 45799 | CTACCTAAGGACCGGG | 51 | 1609 |
| 696213 | 3397 | 3412 | 45786 | 45801 | CACTACCTAAGGACCG | 32 | 1610 |
| 696214 | 3405 | 3420 | 45794 | 45809 | CACACTAGCACTACCT | 41 | 1611 |
| 696215 | 3407 | 3422 | 45796 | 45811 | ACCACACTAGCACTAC | 48 | 1612 |
| 696216 | 3409 | 3424 | 45798 | 45813 | AGACCACACTAGCACT | 48 | 1613 |
| 696217 | 3411 | 3426 | 45800 | 45815 | ACAGACCACACTAGCA | 43 | 1614 |
| 696218 | 3413 | 3428 | 45802 | 45817 | TTACAGACCACACTAG | 16 | 1615 |
| 696219 | 3418 | 3433 | 45807 | 45822 | AGATATTACAGACCAC | 76 | 1616 |
| 696220 | 3423 | 3438 | 45812 | 45827 | TAGTAAGATATTACAG | 24 | 1617 |
| 696221 | 3425 | 3440 | 45814 | 45829 | CTTAGTAAGATATTAC | 5 | 1618 |
| 696222 | 3430 | 3445 | 45819 | 45834 | AAGGCCTTAGTAAGAT | 25 | 1619 |
| 696223 | 3432 | 3447 | 45821 | 45836 | CAAAGGCCTTAGTAAG | 18 | 1620 |
| 696224 | 3436 | 3451 | 45825 | 45840 | ATACCAAAGGCCTTAG | 48 | 1621 |
| 696225 | 3438 | 3453 | 45827 | 45842 | GTATACCAAAGGCCTT | 49 | 1622 |
| 696226 | 3471 | 3486 | 45860 | 45875 | AAACTAAAATACGCAT | 2 | 1623 |
| 696227 | 3473 | 3488 | 45862 | 45877 | CAAAACTAAAATACGC | 34 | 1624 |
| 696228 | 3486 | 3501 | 45875 | 45890 | AACCCCTTCTTTGCAA | 34 | 1625 |
| 696229 | 3492 | 3507 | 45881 | 45896 | AGACCAAACCCCTTCT | 45 | 1626 |
| 696230 | 3494 | 3509 | 45883 | 45898 | AGAGACCAAACCCCTT | 35 | 1627 |
| 696231 | 3496 | 3511 | 45885 | 45900 | ACAGAGACCAAACCCC | 28 | 1628 |

TABLE 25
Inhibition of K-Ras mRNA by 3-10-3 cEt gapmers targeting
SEQ ID NO: 1 and 2

| | SEQ ID | SEQ ID | SEQ ID | | | | |
|---|---|---|---|---|---|---|---|
| | NO: 1 | NO: 1 | NO: 2 | SEQ ID | | | SEQ |
| ISIS | Start | Stop | Start | 2: Stop | | % | ID |
| NO | Site | Site | Site | Site | Sequence | Inhibition | NO |
| 540806 | 2981 | 2996 | 45370 | 45385 | GCATGAAGATTTCTGG | 44 | 122 |
| 540806 | 2981 | 2996 | 45370 | 45385 | GCATGAAGATTTCTGG | 58 | 122 |
| 651703 | 3548 | 3563 | 45937 | 45952 | GCTTGATCGAAGAGTT | 62 | 1629 |
| 651704 | 3554 | 3569 | 45943 | 45958 | AAAGTAGCTTGATCGA | 69 | 1630 |
| 651705 | 3568 | 3583 | 45957 | 45972 | GAAGTGATTTACATAA | 40 | 1631 |
| 651706 | 3595 | 3610 | 45984 | 45999 | TAATCAAGTTTATTCC | 40 | 1632 |
| 651719 | 3700 | 3715 | 46089 | 46104 | CTGGAATATTACACAT | 48 | 1633 |
| 651720 | 3715 | 3730 | 46104 | 46119 | CTTATGCAGAGAAAAC | 26 | 968 |
| 651727 | 3806 | 3821 | 46195 | 46210 | TACATAGAAGTTTCCT | 38 | 1634 |
| 651728 | 3812 | 3827 | 46201 | 46216 | GATTTTTACATAGAAG | 18 | 1635 |
| 651730 | 3859 | 3874 | 46248 | 46263 | GTGTTCCAAAGATCTG | 59 | 1636 |
| 696232 | 3498 | 3513 | 45887 | 45902 | GCACAGAGACCAAACC | 31 | 1637 |
| 696233 | 3507 | 3522 | 45896 | 45911 | ATAGAGCTGGCACAGA | 33 | 1638 |
| 696234 | 3511 | 3526 | 45900 | 45915 | AATTATAGAGCTGGCA | 29 | 1639 |
| 696235 | 3513 | 3528 | 45902 | 45917 | ACAATTATAGAGCTGG | 53 | 1640 |
| 696236 | 3515 | 3530 | 45904 | 45919 | AAACAATTATAGAGCT | 8 | 1641 |
| 696237 | 3536 | 3551 | 45925 | 45940 | AGTTTCAGTGGAATCG | 66 | 1642 |
| 696238 | 3537 | 3552 | 45926 | 45941 | GAGTTTCAGTGGAATC | 56 | 1643 |
| 696239 | 3543 | 3558 | 45932 | 45947 | ATCGAAGAGTTTCAGT | 49 | 1644 |
| 696240 | 3544 | 3559 | 45933 | 45948 | GATCGAAGAGTTTCAG | 51 | 1645 |
| 696241 | 3549 | 3564 | 45938 | 45953 | AGCTTGATCGAAGAGT | 71 | 1646 |
| 696242 | 3550 | 3565 | 45939 | 45954 | TAGCTTGATCGAAGAG | 62 | 1647 |
| 696243 | 3551 | 3566 | 45940 | 45955 | GTAGCTTGATCGAAGA | 53 | 1648 |
| 696244 | 3552 | 3567 | 45941 | 45956 | AGTAGCTTGATCGAAG | 56 | 1649 |
| 696245 | 3553 | 3568 | 45942 | 45957 | AAGTAGCTTGATCGAA | 50 | 1650 |
| 696246 | 3558 | 3573 | 45947 | 45962 | ACATAAAGTAGCTTGA | 21 | 1651 |
| 696247 | 3560 | 3575 | 45949 | 45964 | TTACATAAAGTAGCTT | 37 | 1652 |
| 696248 | 3563 | 3578 | 45952 | 45967 | GATTTACATAAAGTAG | 11 | 1653 |
| 696249 | 3572 | 3587 | 45961 | 45976 | CAATGAAGTGATTTAC | 34 | 1654 |
| 696250 | 3593 | 3608 | 45982 | 45997 | ATCAAGTTTATTCCTT | 57 | 1655 |
| 696251 | 3594 | 3609 | 45983 | 45998 | AATCAAGTTTATTCCT | 46 | 1656 |
| 696252 | 3596 | 3611 | 45985 | 46000 | ATAATCAAGTTTATTC | 23 | 1657 |
| 696253 | 3636 | 3651 | 46025 | 46040 | GTCCTAAAAGAATCAC | 46 | 1658 |
| 696254 | 3639 | 3654 | 46028 | 46043 | ATTGTCCTAAAAGAAT | 41 | 1659 |
| 696255 | 3644 | 3659 | 46033 | 46048 | CAGTAATTGTCCTAAA | 35 | 1660 |
| 696256 | 3646 | 3661 | 46035 | 46050 | TACAGTAATTGTCCTA | 48 | 1661 |
| 696257 | 3649 | 3664 | 46038 | 46053 | GTGTACAGTAATTGTC | 43 | 1662 |
| 696258 | 3653 | 3668 | 46042 | 46057 | TAATGTGTACAGTAAT | 0 | 1663 |
| 696259 | 3655 | 3670 | 46044 | 46059 | CTTAATGTGTACAGTA | 46 | 1664 |
| 696260 | 3657 | 3672 | 46046 | 46061 | ACCTTAATGTGTACAG | 39 | 1665 |
| 696261 | 3659 | 3674 | 46048 | 46063 | ACACCTTAATGTGTAC | 15 | 1666 |
| 696262 | 3663 | 3678 | 46052 | 46067 | ACATACACCTTAATGT | 0 | 1667 |
| 696263 | 3665 | 3680 | 46054 | 46069 | TGACATACACCTTAAT | 37 | 1668 |
| 696264 | 3667 | 3682 | 46056 | 46071 | TCTGACATACACCTTA | 33 | 1669 |
| 696265 | 3669 | 3684 | 46058 | 46073 | TATCTGACATACACCT | 50 | 1670 |
| 696266 | 3671 | 3686 | 46060 | 46075 | AATATCTGACATACAC | 39 | 1671 |
| 696267 | 3680 | 3695 | 46069 | 46084 | GTCAATATGAATATCT | 53 | 1672 |
| 696268 | 3686 | 3701 | 46075 | 46090 | ATTTGGGTCAATATGA | 31 | 1673 |
| 696269 | 3690 | 3705 | 46079 | 46094 | ACACATTTGGGTCAAT | 37 | 1674 |
| 696270 | 3692 | 3707 | 46081 | 46096 | TTACACATTTGGGTCA | 47 | 1675 |
| 696271 | 3719 | 3734 | 46108 | 46123 | ATTACTTATGCAGAGA | 73 | 977 |
| 696272 | 3755 | 3770 | 46144 | 46159 | ACCCAGATAAAACTAT | 16 | 1676 |
| 696273 | 3757 | 3772 | 46146 | 46161 | GTACCCAGATAAAACT | 12 | 1677 |
| 696274 | 3761 | 3776 | 46150 | 46165 | ATTTGTACCCAGATAA | 29 | 1678 |
| 696275 | 3763 | 3778 | 46152 | 46167 | TTATTTGTACCCAGAT | 38 | 1679 |
| 696276 | 3765 | 3780 | 46154 | 46169 | GTTTATTTGTACCCAG | 67 | 1680 |
| 696277 | 3773 | 3788 | 46162 | 46177 | AGGCACCTGTTTATTT | 46 | 1681 |
| 696278 | 3777 | 3792 | 46166 | 46181 | GTTCAGGCACCTGTTT | 30 | 1682 |
| 696279 | 3782 | 3797 | 46171 | 46186 | AACTAGTTCAGGCACC | 39 | 1683 |
| 696280 | 3791 | 3806 | 46180 | 46195 | TTGTCTGTGAACTAGT | 54 | 1684 |
| 696281 | 3793 | 3808 | 46182 | 46197 | CCTTGTCTGTGAACTA | 63 | 1685 |
| 696282 | 3802 | 3817 | 46191 | 46206 | TAGAAGTTTCCTTGTC | 50 | 1686 |
| 696283 | 3804 | 3819 | 46193 | 46208 | CATAGAAGTTTCCTTG | 51 | 1687 |
| 696284 | 3825 | 3840 | 46214 | 46229 | CAGAAATCATAGTGAT | 37 | 1688 |
| 696285 | 3837 | 3852 | 46226 | 46241 | CACATAGCAATTCAGA | 50 | 1689 |
| 696286 | 3841 | 3856 | 46230 | 46245 | GTTTCACATAGCAATT | 47 | 769 |
| 696287 | 3844 | 3859 | 46233 | 46248 | GTAGTTTCACATAGCA | 79 | 770 |
| 696288 | 3846 | 3861 | 46235 | 46250 | CTGTAGTTTCACATAG | 51 | 771 |
| 696289 | 3850 | 3865 | 46239 | 46254 | AGATCTGTAGTTTCAC | 74 | 1690 |
| 696290 | 3852 | 3867 | 46241 | 46256 | AAAGATCTGTAGTTTC | 47 | 1691 |
| 696291 | 3854 | 3869 | 46243 | 46258 | CCAAAGATCTGTAGTT | 43 | 1692 |
| 696292 | 3861 | 3876 | 46250 | 46265 | CAGTGTTCCAAAGATC | 56 | 1693 |
| 696293 | 3873 | 3888 | 46262 | 46277 | ACCCTACCTAAACAGT | 22 | 1694 |
| 696294 | 3878 | 3893 | 46267 | 46282 | TTAACACCCTACCTAA | 18 | 1695 |
| 696295 | 3880 | 3895 | 46269 | 46284 | TCTTAACACCCTACCT | 20 | 1696 |
| 696296 | 3887 | 3902 | 46276 | 46291 | GTGTAAGTCTTAACAC | 19 | 1697 |
| 696297 | 3892 | 3907 | 46281 | 46296 | GTACTGTGTAAGTCTT | 59 | 1698 |
| 696298 | 3902 | 3917 | 46291 | 46306 | TAGAAACGAGGTACTG | 41 | 1699 |
| 696299 | 3905 | 3920 | 46294 | 46309 | GTGTAGAAACGAGGTA | 73 | 1700 |

TABLE 26
Inhibition of K-Ras mRNA by 3-10-3
cEt gapmers targeting SEQ ID NO: 1 and 2

| | SEQ ID | SEQ ID | SEQ ID | | | | |
|---|---|---|---|---|---|---|---|
| | NO: 1 | NO: 1 | NO: 2 | SEQ ID | | | SEQ |
| ISIS | Start | Stop | Start | 2: Stop | | % | ID |
| NO | Site | Site | Site | Site | Sequence | Inhibition | NO |
| 540806 | 2981 | 2996 | 45370 | 45385 | GCATGAAGATTTCTGG | 37 | 122 |
| 540806 | 2981 | 2996 | 45370 | 45385 | GCATGAAGATTTCTGG | 60 | 122 |
| 651745 | 3972 | 3987 | 46361 | 46376 | AATTCAAGAGGCCTAA | 1 | 1701 |
| 651749 | 4087 | 4102 | 46476 | 46491 | TTCTAGAATTCTCCCC | 50 | 1702 |
| 651750 | 4140 | 4155 | 46529 | 46544 | AACTTCAACAAGGATT | 30 | 1703 |
| 651755 | 4233 | 4248 | 46622 | 46637 | GAACATTCACTCAAAT | 8 | 1704 |
| 651756 | 4252 | 4267 | 46641 | 46656 | GCCTAGAATGCCTACT | 38 | 1705 |
| 651758 | 4271 | 4286 | 46660 | 46675 | TGTGACTCAGTTAAAT | 33 | 1706 |
| 651766 | 4296 | 4311 | 46685 | 46700 | AGTTAGGTTCTAAATT | 0 | 1707 |
| 651767 | 4302 | 4317 | 46691 | 46706 | TATAAAAGTTAGGTTC | 0 | 1708 |
| 663588 | 4185 | 4200 | 46574 | 46589 | AACATGTTAATGCCTA | 46 | 1709 |
| 696300 | 3910 | 3925 | 46299 | 46314 | TCTCTGTGTAGAAACG | 41 | 1710 |
| 696301 | 3935 | 3950 | 46324 | 46339 | AGTTCCTGAAGTATGG | 59 | 1711 |
| 696302 | 3944 | 3959 | 46333 | 46348 | AAGCACTGCAGTTCCT | 52 | 1712 |
| 696303 | 3949 | 3964 | 46338 | 46353 | CTCATAAGCACTGCAG | 54 | 1713 |
| 696304 | 3951 | 3966 | 46340 | 46355 | CCCTCATAAGCACTGC | 57 | 1714 |
| 696305 | 3956 | 3971 | 46345 | 46360 | ATATCCCCTCATAAGC | 21 | 1715 |
| 696306 | 3961 | 3976 | 46350 | 46365 | CCTAAATATCCCCTCA | 20 | 1716 |
| 696307 | 3963 | 3978 | 46352 | 46367 | GGCCTAAATATCCCCT | 29 | 1717 |
| 696308 | 3970 | 3985 | 46359 | 46374 | TTCAAGAGGCCTAAAT | 31 | 1718 |
| 696309 | 3988 | 4003 | 46377 | 46392 | GCCCATCTACATCAAA | 51 | 1719 |
| 696310 | 3992 | 4007 | 46381 | 46396 | AAATGCCCATCTACAT | 16 | 1720 |
| 696311 | 4009 | 4024 | 46398 | 46413 | TAACCACTACCTTAAA | 21 | 1721 |
| 696312 | 4011 | 4026 | 46400 | 46415 | ATTAACCACTACCTTA | 0 | 1722 |
| 696313 | 4015 | 4030 | 46404 | 46419 | GGTAATTAACCACTAC | 20 | 1723 |
| 696314 | 4020 | 4035 | 46409 | 46424 | ATAAAGGTAATTAACC | 0 | 1724 |
| 696315 | 4028 | 4043 | 46417 | 46432 | AAGTTCACATAAAGGT | 43 | 1725 |
| 696316 | 4029 | 4044 | 46418 | 46433 | AAAGTTCACATAAAGG | 37 | 978 |
| 696317 | 4035 | 4050 | 46424 | 46439 | CCATTCAAAGTTCACA | 71 | 979 |
| 696318 | 4037 | 4052 | 46426 | 46441 | AACCATTCAAAGTTCA | 67 | 980 |
| 696319 | 4038 | 4053 | 46427 | 46442 | AAACCATTCAAAGTTC | 26 | 1726 |
| 696320 | 4043 | 4058 | 46432 | 46447 | TTGTTAAACCATTCAA | 21 | 1727 |
| 696321 | 4075 | 4090 | 46464 | 46479 | CCCCCTTTAAAATCTC | 10 | 1728 |
| 696322 | 4084 | 4099 | 46473 | 46488 | TAGAATTCTCCCCCTT | 45 | 1729 |
| 696323 | 4109 | 4124 | 46498 | 46513 | GTAATAATTAGGTAAC | 18 | 1730 |
| 696324 | 4114 | 4129 | 46503 | 46518 | AGGCTGTAATAATTAG | 39 | 1731 |
| 696325 | 4116 | 4131 | 46505 | 46520 | TAAGGCTGTAATAATT | 6 | 1732 |
| 696326 | 4119 | 4134 | 46508 | 46523 | CTTTAAGGCTGTAATA | 15 | 1733 |
| 696327 | 4136 | 4151 | 46525 | 46540 | TCAACAAGGATTTTTG | 3 | 1734 |
| 696328 | 4138 | 4153 | 46527 | 46542 | CTTCAACAAGGATTTT | 40 | 1735 |
| 696329 | 4169 | 4184 | 46558 | 46573 | AGTCTATGTAATTTAG | 21 | 1736 |
| 696330 | 4174 | 4189 | 46563 | 46578 | GCCTAAGTCTATGTAA | 28 | 1737 |
| 696331 | 4176 | 4191 | 46565 | 46580 | ATGCCTAAGTCTATGT | 30 | 1738 |
| 696332 | 4178 | 4193 | 46567 | 46582 | TAATGCCTAAGTCTAT | 24 | 1739 |
| 696333 | 4183 | 4198 | 46572 | 46587 | CATGTTAATGCCTAAG | 52 | 1740 |
| 696334 | 4187 | 4202 | 46576 | 46591 | CAAACATGTTAATGCC | 42 | 1741 |
| 696335 | 4202 | 4217 | 46591 | 46606 | TGCTATATTCTTCCAC | 53 | 1742 |
| 696336 | 4227 | 4242 | 46616 | 46631 | TCACTCAAATGATACA | 58 | 1743 |
| 696337 | 4230 | 4245 | 46619 | 46634 | CATTCACTCAAATGAT | 27 | 1744 |
| 696338 | 4235 | 4250 | 46624 | 46639 | GGGAACATTCACTCAA | 47 | 1745 |
| 696339 | 4242 | 4257 | 46631 | 46646 | CCTACTTGGGAACATT | 34 | 1746 |
| 696340 | 4244 | 4259 | 46633 | 46648 | TGCCTACTTGGGAACA | 22 | 1747 |
| 696341 | 4254 | 4269 | 46643 | 46658 | GAGCCTAGAATGCCTA | 33 | 1748 |
| 696342 | 4257 | 4272 | 46646 | 46661 | ATAGAGCCTAGAATGC | 0 | 1749 |
| 696343 | 4259 | 4274 | 46648 | 46663 | AAATAGAGCCTAGAAT | 0 | 1750 |
| 696344 | 4263 | 4278 | 46652 | 46667 | AGTTAAATAGAGCCTA | 13 | 1751 |
| 696345 | 4268 | 4283 | 46657 | 46672 | GACTCAGTTAAATAGA | 33 | 1752 |
| 696346 | 4269 | 4284 | 46658 | 46673 | TGACTCAGTTAAATAG | 23 | 1753 |
| 696347 | 4272 | 4287 | 46661 | 46676 | GTGTGACTCAGTTAAA | 51 | 1754 |
| 696348 | 4289 | 4304 | 46678 | 46693 | TTCTAAATTCCTATGC | 4 | 1755 |
| 696349 | 4292 | 4307 | 46681 | 46696 | AGGTTCTAAATTCCTA | 3 | 1756 |
| 696350 | 4300 | 4315 | 46689 | 46704 | TAAAAGTTAGGTTCTA | 8 | 1757 |
| 696351 | 4310 | 4325 | 46699 | 46714 | TGATAACCTATAAAAG | 20 | 1758 |
| 696352 | 4314 | 4329 | 46703 | 46718 | GTTTTGATAACCTATA | 32 | 1759 |
| 696353 | 4319 | 4334 | 46708 | 46723 | CAACAGTTTTGATAAC | 36 | 1760 |
| 696354 | 4321 | 4336 | 46710 | 46725 | GACAACAGTTTTGATA | 38 | 1761 |
| 696355 | 4323 | 4338 | 46712 | 46727 | GTGACAACAGTTTTGA | 60 | 1762 |
| 696356 | 4329 | 4344 | 46718 | 46733 | GCAATGGTGACAACAG | 69 | 1763 |
| 696357 | 4331 | 4346 | 46720 | 46735 | GTGCAATGGTGACAAC | 22 | 845 |
| 696358 | 4334 | 4349 | 46723 | 46738 | ATTGTGCAATGGTGAC | 63 | 846 |
| 696359 | 4336 | 4351 | 46725 | 46740 | AAATTGTGCAATGGTG | 39 | 847 |
| 696360 | 4353 | 4368 | 46742 | 46757 | ATGTATATATTAGGAC | 20 | 1764 |
| 696361 | 4355 | 4370 | 46744 | 46759 | CTATGTATATATTAGG | 22 | 1765 |
| 696362 | 4367 | 4382 | 46756 | 46771 | CCCACAAAGTTTCTAT | 22 | 1766 |
| 696363 | 4369 | 4384 | 46758 | 46773 | GCCCCACAAAGTTTCT | 23 | 1767 |
| 696364 | 4376 | 4391 | 46765 | 46780 | TTAACATGCCCCACAA | 20 | 1768 |
| 696365 | 4378 | 4393 | 46767 | 46782 | ACTTAACATGCCCCAC | 47 | 1769 |
| 696366 | 4380 | 4395 | 46769 | 46784 | TAACTTAACATGCCCC | 45 | 1770 |
| 696367 | 4385 | 4400 | 46774 | 46789 | AACTGTAACTTAACAT | 0 | 1771 |

TABLE 27
Inhibition of K-Ras mRNA by 3-10-3
cEt gapmers targeting SEQ ID NO: 1 and 2

| | SEQ ID | SEQ ID | SEQ ID | SEQ ID | | | |
|---|---|---|---|---|---|---|---|
| | NO: 1 | NO: 1 | NO: 2 | NO: 2 | | | SEQ |
| ISIS | Start | Stop | Start | Stop | | % | ID |
| NO | Site | Site | Site | Site | Sequence | Inhibition | NO |
| 540806 | 2981 | 2996 | 45370 | 45385 | GCATGAAGATTTCTGG | 72 | 122 |
| 540806 | 2981 | 2996 | 45370 | 45385 | GCATGAAGATTTCTGG | 77 | 122 |
| 651778 | 4389 | 4404 | 46778 | 46793 | TGCAAACTGTAACTTA | 43 | 1772 |
| 651781 | 4502 | 4517 | 46891 | 46906 | CAGATAGTTTTTGCTG | 13 | 1773 |
| 651782 | 4508 | 4523 | 46897 | 46912 | AATCTTCAGATAGTTT | 48 | 1774 |
| 651784 | 4566 | 4581 | 46955 | 46970 | GGTTCTAAAAAACATT | 21 | 1775 |
| 651791 | 4584 | 4599 | 46973 | 46988 | GCTTTAAGGTAACTGC | 45 | 1776 |
| 651792 | 4591 | 4606 | 46980 | 46995 | AAATTCAGCTTTAAGG | 31 | 1777 |
| 651795 | 4620 | 4635 | 47009 | 47024 | CCAGTATTAACACAGA | 70 | 973 |
| 651798 | 4705 | 4720 | 47094 | 47109 | AAGAACTCATGTGAGT | 40 | 1778 |
| 651799 | 4719 | 4734 | 47108 | 47123 | TATGACTATTCTTCAA | 46 | 1779 |
| 651804 | 4792 | 4807 | 47181 | 47196 | CATCTAAATTACCTAT | 0 | 1780 |
| 651809 | 4899 | 4914 | 47288 | 47303 | TTGGAAACTTTCGGAT | 32 | 1781 |
| 663600 | 4637 | 4652 | 47026 | 47041 | TGCAGAATTCATGCTA | 15 | 1782 |
| 696368 | 4387 | 4402 | 46776 | 46791 | CAAACTGTAACTTAAC | 31 | 1783 |
| 696369 | 4406 | 4421 | 46795 | 46810 | CAAATGAGATGAACTT | 29 | 1784 |
| 696370 | 4408 | 4423 | 46797 | 46812 | TACAAATGAGATGAAC | 13 | 1785 |
| 696371 | 4458 | 4473 | 46847 | 46862 | ATATACTGTTTGAAGA | 14 | 1786 |
| 696372 | 4475 | 4490 | 46864 | 46879 | ATCCCCTAAAAAAAGT | 14 | 1787 |
| 696373 | 4498 | 4513 | 46887 | 46902 | TAGTTTTTGCTGTCTA | 29 | 1788 |
| 696374 | 4500 | 4515 | 46889 | 46904 | GATAGTTTTTGCTGTC | 37 | 1789 |
| 696375 | 4510 | 4525 | 46899 | 46914 | GAAATCTTCAGATAGT | 43 | 1790 |
| 696376 | 4512 | 4527 | 46901 | 46916 | TGGAAATCTTCAGATA | 32 | 1791 |
| 696377 | 4525 | 4540 | 46914 | 46929 | ACTTTTTGACAAATGG | 76 | 981 |
| 696378 | 4530 | 4545 | 46919 | 46934 | TCATTACTTTTTGACA | 0 | 982 |
| 696379 | 4544 | 4559 | 46933 | 46948 | CAATTATCAAGAAATC | 2 | 1792 |
| 696380 | 4549 | 4564 | 46938 | 46953 | CTACACAATTATCAAG | 8 | 1793 |
| 696381 | 4554 | 4569 | 46943 | 46958 | CATTACTACACAATTA | 3 | 1794 |
| 696382 | 4556 | 4571 | 46945 | 46960 | AACATTACTACACAAT | 16 | 1795 |
| 696383 | 4586 | 4601 | 46975 | 46990 | CAGCTTTAAGGTAACT | 51 | 1796 |
| 696384 | 4589 | 4604 | 46978 | 46993 | ATTCAGCTTTAAGGTA | 57 | 1797 |
| 696385 | 4617 | 4632 | 47006 | 47021 | GTATTAACACAGAAGT | 46 | 983 |
| 696386 | 4622 | 4637 | 47011 | 47026 | ATCCAGTATTAACACA | 43 | 984 |
| 696387 | 4628 | 4643 | 47017 | 47032 | CATGCTATCCAGTATT | 45 | 1798 |
| 696388 | 4631 | 4646 | 47020 | 47035 | ATTCATGCTATCCAGT | 52 | 1799 |
| 696389 | 4633 | 4648 | 47022 | 47037 | GAATTCATGCTATCCA | 57 | 1800 |
| 696390 | 4639 | 4654 | 47028 | 47043 | AATGCAGAATTCATGC | 43 | 1801 |
| 696391 | 4662 | 4677 | 47051 | 47066 | TTATGACAGCTATTCA | 48 | 1802 |
| 696392 | 4697 | 4712 | 47086 | 47101 | ATGTGAGTATCTTTCT | 46 | 1803 |
| 696393 | 4700 | 4715 | 47089 | 47104 | CTCATGTGAGTATCTT | 62 | 1804 |
| 696394 | 4707 | 4722 | 47096 | 47111 | TCAAGAACTCATGTGA | 33 | 1805 |
| 696395 | 4709 | 4724 | 47098 | 47113 | CTTCAAGAACTCATGT | 7 | 1806 |
| 696396 | 4713 | 4728 | 47102 | 47117 | TATTCTTCAAGAACTC | 50 | 1807 |
| 696397 | 4715 | 4730 | 47104 | 47119 | ACTATTCTTCAAGAAC | 39 | 1808 |
| 696398 | 4717 | 4732 | 47106 | 47121 | TGACTATTCTTCAAGA | 39 | 1809 |
| 696399 | 4724 | 4739 | 47113 | 47128 | CTAGTTATGACTATTC | 56 | 1810 |
| 696400 | 4726 | 4741 | 47115 | 47130 | ATCTAGTTATGACTAT | 19 | 1811 |
| 696401 | 4728 | 4743 | 47117 | 47132 | TAATCTAGTTATGACT | 9 | 1812 |
| 696402 | 4733 | 4748 | 47122 | 47137 | GATCTTAATCTAGTTA | 25 | 1813 |
| 696403 | 4735 | 4750 | 47124 | 47139 | CAGATCTTAATCTAGT | 51 | 1814 |
| 696404 | 4737 | 4752 | 47126 | 47141 | CACAGATCTTAATCTA | 39 | 1815 |
| 696405 | 4763 | 4778 | 47152 | 47167 | AGGCACTTCAAACTAT | 39 | 1816 |
| 696406 | 4766 | 4781 | 47155 | 47170 | AACAGGCACTTCAAAC | 20 | 1817 |
| 696407 | 4768 | 4783 | 47157 | 47172 | CAAACAGGCACTTCAA | 33 | 1818 |
| 696408 | 4772 | 4787 | 47161 | 47176 | ATCCCAAACAGGCACT | 45 | 1819 |
| 696409 | 4775 | 4790 | 47164 | 47179 | ATTATCCCAAACAGGC | 53 | 1820 |
| 696410 | 4782 | 4797 | 47171 | 47186 | ACCTATCATTATCCCA | 48 | 1821 |
| 696411 | 4785 | 4800 | 47174 | 47189 | ATTACCTATCATTATC | 24 | 1822 |
| 696412 | 4790 | 4805 | 47179 | 47194 | TCTAAATTACCTATCA | 16 | 1823 |
| 696413 | 4795 | 4810 | 47184 | 47199 | ATTCATCTAAATTACC | 4 | 1824 |
| 696414 | 4802 | 4817 | 47191 | 47206 | CCCCTAAATTCATCTA | 18 | 1825 |
| 696415 | 4824 | 4839 | 47213 | 47228 | TATCTGCAGATAACTT | 3 | 1826 |
| 696416 | 4826 | 4841 | 47215 | 47230 | CATATCTGCAGATAAC | 3 | 1827 |
| 696417 | 4828 | 4843 | 47217 | 47232 | AACATATCTGCAGATA | 0 | 1828 |
| 696418 | 4833 | 4848 | 47222 | 47237 | CCCTCAACATATCTGC | 20 | 1829 |
| 696419 | 4869 | 4884 | 47258 | 47273 | CAGTTAGCTCTGTGGG | 48 | 1830 |
| 696420 | 4879 | 4894 | 47268 | 47283 | CACTGTAACCCAGTTA | 37 | 1831 |
| 696421 | 4881 | 4896 | 47270 | 47285 | AACACTGTAACCCAGT | 58 | 1832 |
| 696422 | 4883 | 4898 | 47272 | 47287 | AAAACACTGTAACCCA | 44 | 1833 |
| 696423 | 4889 | 4904 | 47278 | 47293 | TCGGATAAAACACTGT | 46 | 1834 |
| 696424 | 4891 | 4906 | 47280 | 47295 | TTTCGGATAAAACACT | 14 | 1835 |
| 696425 | 4895 | 4910 | 47284 | 47299 | AAACTTTCGGATAAAA | 0 | 1836 |
| 696426 | 4897 | 4912 | 47286 | 47301 | GGAAACTTTCGGATAA | 56 | 1837 |
| 696427 | 4904 | 4919 | 47293 | 47308 | TGGAATTGGAAACTTT | 48 | 1838 |
| 696428 | 4906 | 4921 | 47295 | 47310 | AGTGGAATTGGAAACT | 14 | 1839 |
| 696429 | 4913 | 4928 | 47302 | 47317 | ACAAGACAGTGGAATT | 31 | 1840 |
| 696430 | 4917 | 4932 | 47306 | 47321 | AAACACAAGACAGTGG | 17 | 1841 |
| 696431 | 4959 | 4974 | 47348 | 47363 | ATTGGCACTCAAAGGA | 35 | 1842 |
| 696432 | 4961 | 4976 | 47350 | 47365 | AAATTGGCACTCAAAG | 30 | 1843 |

TABLE 28
Inhibition of K-Ras mRNA by 3-10-3 cEt gapmers targeting SEQ ID NO: 1, 2 and 3

| | SEQ ID | SEQ ID | SEQ ID | SEQ ID | SEQ ID | SEQ ID | | | |
|---|---|---|---|---|---|---|---|---|---|
| | NO: 1 | NO: 1 | NO: 2 | NO: 2 | NO: 3 | NO: 3 | | | SEQ |
| ISIS | Start | Stop | Start | Stop | Start | Stop | | % | ID |
| NO | Site | Site | Site | Site | Site | Site | Sequence | Inhibition | NO |
| 540806 | 2981 | 2996 | 45370 | 45385 | 3105 | 3120 | GCATGAAGATTTCTGG | 77 | 122 |
| 540806 | 2981 | 2996 | 45370 | 45385 | 3105 | 3120 | GCATGAAGATTTCTGG | 81 | 122 |
| 651813 | 5033 | 5048 | 47422 | 47437 | 5157 | 5172 | GTTTACACTATACAAA | 18 | 1844 |
| 651814 | 5039 | 5054 | 47428 | 47443 | 5163 | 5178 | GTTTCAGTTTACACTA | 43 | 1845 |
| 651815 | 5054 | 5069 | 47443 | 47458 | 5178 | 5193 | GTACAAAATGTGCATG | 26 | 1846 |
| 651816 | 5103 | 5118 | 47492 | 47507 | 5227 | 5242 | GGAAAACAACTGGATC | 40 | 1847 |
| 651818 | 5144 | 5159 | 47533 | 47548 | 5268 | 5283 | TTGATATGACCAACAT | 0 | 1848 |
| 651830 | N/A | N/A | 37421 | 37436 | 681 | 696 | CAATCTGTATTGTCGG | 67 | 1849 |
| 651837 | N/A | N/A | 3302 | 3317 | N/A | N/A | AGTCTATTTCAGGCGG | 76 | 1850 |
| 663623 | 5065 | 5080 | 47454 | 47469 | 5189 | 5204 | GAAAGCACAATGTACA | 24 | 1851 |
| 663626 | 5086 | 5101 | 47475 | 47490 | 5210 | 5225 | CACTGCATATGTCCCA | 54 | 1852 |
| 663627 | 5094 | 5109 | 47483 | 47498 | 5218 | 5233 | CTGGATCACACTGCAT | 49 | 1853 |
| 663630 | 5123 | 5138 | 47512 | 47527 | 5247 | 5262 | GGTCAGCGCAACCAAA | 57 | 1854 |
| 663635 | 5150 | 5165 | 47539 | 47554 | 5274 | 5289 | TAATGTTTGATATGAC | 0 | 1855 |
| 696433 | 4968 | 4983 | 47357 | 47372 | 5092 | 5107 | TAGTAAGAAATTGGCA | 32 | 1856 |
| 696434 | 4973 | 4988 | 47362 | 47377 | 5097 | 5112 | AGTACTAGTAAGAAAT | 10 | 1857 |
| 696435 | 4975 | 4990 | 47364 | 47379 | 5099 | 5114 | ATAGTACTAGTAAGAA | 19 | 1858 |
| 696436 | 4977 | 4992 | 47366 | 47381 | 5101 | 5116 | AAATAGTACTAGTAAG | 9 | 1859 |
| 696437 | 4984 | 4999 | 47373 | 47388 | 5108 | 5123 | CATTAAGAAATAGTAC | 12 | 1860 |
| 696438 | 5000 | 5015 | 47389 | 47404 | 5124 | 5139 | CCAGGTAAACATGTTA | 59 | 1861 |
| 696439 | 5002 | 5017 | 47391 | 47406 | 5126 | 5141 | TTCCAGGTAAACATGT | 38 | 1862 |
| 696440 | 5004 | 5019 | 47393 | 47408 | 5128 | 5143 | CATTCCAGGTAAACAT | 47 | 1863 |
| 696441 | 5035 | 5050 | 47424 | 47439 | 5159 | 5174 | CAGTTTACACTATACA | 46 | 1864 |
| 696442 | 5041 | 5056 | 47430 | 47445 | 5165 | 5180 | ATGTTTCAGTTTACAC | 34 | 1865 |
| 696443 | 5045 | 5060 | 47434 | 47449 | 5169 | 5184 | GTGCATGTTTCAGTTT | 44 | 1866 |
| 696444 | 5079 | 5094 | 47468 | 47483 | 5203 | 5218 | TATGTCCCACAAAAGA | 38 | 1867 |
| 696445 | 5082 | 5097 | 47471 | 47486 | 5206 | 5221 | GCATATGTCCCACAAA | 51 | 1868 |
| 696446 | 5084 | 5099 | 47473 | 47488 | 5208 | 5223 | CTGCATATGTCCCACA | 62 | 1869 |
| 696447 | 5099 | 5114 | 47488 | 47503 | 5223 | 5238 | AACAACTGGATCACAC | 27 | 1870 |
| 696448 | 5101 | 5116 | 47490 | 47505 | 5225 | 5240 | AAAACAACTGGATCAC | 23 | 1871 |
| 696449 | 5115 | 5130 | 47504 | 47519 | 5239 | 5254 | CAACCAAATGATGGAA | 54 | 1872 |
| 696450 | 5128 | 5143 | 47517 | 47532 | 5252 | 5267 | TCCTAGGTCAGCGCAA | 33 | 1873 |
| 696451 | 5130 | 5145 | 47519 | 47534 | 5254 | 5269 | ATTCCTAGGTCAGCGC | 71 | 1874 |
| 696452 | 5134 | 5149 | 47523 | 47538 | 5258 | 5273 | CAACATTCCTAGGTCA | 25 | 1875 |
| 696453 | 5140 | 5155 | 47529 | 47544 | 5264 | 5279 | TATGACCAACATTCCT | 29 | 1876 |
| 696454 | 5142 | 5157 | 47531 | 47546 | 5266 | 5281 | GATATGACCAACATTC | 27 | 1877 |
| 696455 | 5148 | 5163 | 47537 | 47552 | 5272 | 5287 | ATGTTTGATATGACCA | 35 | 1878 |
| 696456 | 5170 | 5185 | 47559 | 47574 | 5294 | 5309 | ATTAAAAGAGTGGTCA | 25 | 1879 |
| 696457 | 5172 | 5187 | 47561 | 47576 | 5296 | 5311 | CAATTAAAAGAGTGGT | 13 | 1880 |
| 696458 | 5206 | 5221 | 47595 | 47610 | 5330 | 5345 | GCACATACTCCTATAA | 29 | 1881 |
| 696459 | 5213 | 5228 | 47602 | 47617 | 5337 | 5352 | CTTCACAGCACATACT | 17 | 1882 |
| 696460 | 5215 | 5230 | 47604 | 47619 | 5339 | 5354 | CACTTCACAGCACATA | 43 | 1883 |
| 696461 | 5221 | 5236 | 47610 | 47625 | 5345 | 5360 | TTAGATCACTTCACAG | 32 | 1884 |
| 696462 | 5223 | 5238 | 47612 | 47627 | 5347 | 5362 | TTTTAGATCACTTCAC | 25 | 1885 |
| 696463 | 5251 | 5266 | 47640 | 47655 | 5375 | 5390 | GTACAGTTCATGACAA | 35 | 1886 |
| 696464 | 5254 | 5269 | 47643 | 47658 | 5378 | 5393 | GTAGTACAGTTCATGA | 33 | 1887 |
| 696465 | 5256 | 5271 | 47645 | 47660 | 5380 | 5395 | GAGTAGTACAGTTCAT | 34 | 1888 |
| 696466 | 5261 | 5276 | 47650 | 47665 | 5385 | 5400 | ATTAGGAGTAGTACAG | 12 | 1889 |
| 696467 | 5263 | 5278 | 47652 | 47667 | 5387 | 5402 | TAATTAGGAGTAGTAC | 12 | 1890 |
| 696468 | 5265 | 5280 | 47654 | 47669 | 5389 | 5404 | AATAATTAGGAGTAGT | 16 | 1891 |
| 696469 | 5271 | 5286 | 47660 | 47675 | 5395 | 5410 | CATTACAATAATTAGG | 0 | 1892 |
| 696470 | 5293 | 5308 | 47682 | 47697 | 5417 | 5432 | GTCACTGTAACTATTT | 7 | 1893 |
| 696473 | N/A | N/A | 37399 | 37414 | 659 | 674 | CTCACCAATGTATAAA | 17 | 1894 |
| 696474 | N/A | N/A | 37406 | 37421 | 666 | 681 | GATCTCCCTCACCAAT | 4 | 1895 |
| 696475 | N/A | N/A | 37413 | 37428 | 673 | 688 | ATTGTCGGATCTCCCT | 39 | 1896 |
| 696476 | N/A | N/A | 37419 | 37434 | 679 | 694 | ATCTGTATTGTCGGAT | 25 | 1897 |
| 696477 | N/A | N/A | 37423 | 37438 | 683 | 698 | TTCAATCTGTATTGTC | 48 | 1898 |
| 696478 | N/A | N/A | 37453 | 37468 | 713 | 728 | CCAGGAGTCTTTTCTT | 35 | 1899 |
| 696479 | N/A | N/A | 37458 | 37473 | 718 | 733 | CACAGCCAGGAGTCTT | 43 | 1900 |
| 696480 | N/A | N/A | 37465 | 37480 | 725 | 740 | ATTTTCACACAGCCAG | 58 | 1901 |
| 696481 | N/A | N/A | 37467 | 37482 | 727 | 742 | TAATTTTCACACAGCC | 52 | 1902 |
| 696482 | N/A | N/A | 37489 | 37504 | 749 | 764 | GATTACATTATAATGC | 15 | 1903 |
| 696483 | N/A | N/A | 37492 | 37507 | 752 | 767 | CCAGATTACATTATAA | 28 | 1904 |
| 696484 | N/A | N/A | N/A | N/A | 756 | 771 | ACACCCAGATTACATT | 12 | 1905 |
| 696485 | N/A | N/A | N/A | N/A | 761 | 776 | CATCAACACCCAGATT | 0 | 1906 |
| 696486 | N/A | N/A | N/A | N/A | 763 | 778 | ATCATCAACACCCAGA | 37 | 1907 |
| 696487 | N/A | N/A | 2233 | 2248 | N/A | N/A | CGGCAAAGAGGGTCGG | 0 | 1908 |
| 696488 | N/A | N/A | 2550 | 2565 | N/A | N/A | AACCTCCACCGCACCC | 2 | 1909 |
| 696489 | N/A | N/A | 2715 | 2730 | N/A | N/A | ACCACTATCCGTCCAG | 45 | 1910 |
| 696490 | N/A | N/A | 2817 | 2832 | N/A | N/A | CCAAACACAATAACCT | 32 | 1911 |
| 696491 | N/A | N/A | 3068 | 3083 | N/A | N/A | CAACTAGCAAGGAAAA | 17 | 1912 |
| 696492 | N/A | N/A | 3175 | 3190 | N/A | N/A | AGTATAAAAGAGACGA | 25 | 1913 |
| 696493 | N/A | N/A | 3951 | 3966 | N/A | N/A | GTTAATTCTGAGCTGA | 53 | 1914 |
| 696494 | N/A | N/A | 3991 | 4006 | N/A | N/A | CATTTTGGACCTCAGT | 33 | 1915 |
| 696495 | N/A | N/A | 3993 | 4008 | N/A | N/A | AGCATTTTGGACCTCA | 71 | 1916 |
| 696496 | N/A | N/A | 4065 | 4080 | N/A | N/A | ATGGCTACAGTCTCAA | 35 | 1917 |
| 696497 | N/A | N/A | 4079 | 4094 | N/A | N/A | CAAATATACTGTGGAT | 26 | 1918 |

TABLE 29
Inhibition of K-Ras mRNA by 3-10-3
cEt gapmers targeting SEQ ID NO: 1 and 2

| | SEQ ID | SEQ ID | | | |
|---|---|---|---|---|---|
| | NO: 2 | NO: 2 | | % | SEQ |
| ISIS | Start | Stop | | Inhibi- | ID |
| NO | Site | Site | Sequence | tion | NO |
| 540806 | 45370 | 45385 | GCATGAAGATTTCTGG | 69 | 122 |
| 540806 | 45370 | 45385 | GCATGAAGATTTCTGG | 77 | 122 |
| 663720 | 27165 | 27180 | TAATTTGTTCTCTGGG | 22 | 1919 |
| 696658 | 23436 | 23451 | GAACTGCAACTATAAG | 18 | 1920 |
| 696659 | 23439 | 23454 | AGAGAACTGCAACTAT | 22 | 1921 |
| 696660 | 23507 | 23522 | ATCTCTAAAGAGCAAT | 24 | 1922 |
| 696661 | 23579 | 23594 | CAATACTCAAGATTCT | 18 | 1923 |
| 696662 | 23688 | 23703 | CAACTCTATTATTCAA | 14 | 1924 |
| 696663 | 24168 | 24183 | CTTAAAATTAACTACC | 0 | 1925 |
| 696664 | 24292 | 24307 | CAGGTACAGAATTCTA | 31 | 1926 |
| 696665 | 24486 | 24501 | AACCTGTATATACATG | 20 | 1927 |
| 696666 | 24583 | 24598 | GAACCAGTTAAGTATC | 28 | 1928 |
| 696667 | 24605 | 24620 | GGATTTTTGGACGAGG | 45 | 1929 |
| 696668 | 24889 | 24904 | ATAGGTTGAGCATTAA | 34 | 1930 |
| 696669 | 24895 | 24910 | TTTCATATAGGTTGAG | 28 | 1931 |
| 696670 | 25198 | 25213 | AAATCTTTGTGCATTG | 16 | 1932 |
| 696671 | 25489 | 25504 | TTATTACAGTGCACCT | 5 | 1933 |
| 696672 | 25494 | 25509 | CTGGATTATTACAGTG | 1 | 1934 |
| 696673 | 25499 | 25514 | ACAGTCTGGATTATTA | 5 | 1935 |
| 696674 | 25501 | 25516 | ACACAGTCTGGATTAT | 0 | 1936 |
| 696675 | 25503 | 25518 | AAACACAGTCTGGATT | 12 | 1937 |
| 696676 | 25696 | 25711 | ACCTATAATGGTGAAT | 1 | 1938 |
| 696677 | 25698 | 25713 | CCACCTATAATGGTGA | 0 | 1939 |
| 696678 | 25701 | 25716 | AACCCACCTATAATGG | 8 | 1940 |
| 696679 | 25704 | 25719 | TTAAACCCACCTATAA | 10 | 1941 |
| 696680 | 25706 | 25721 | ATTTAAACCCACCTAT | 0 | 1942 |
| 696681 | 25855 | 25870 | CCCCCAAGAACTTCAT | 3 | 1943 |
| 696682 | 26058 | 26073 | GTTAAAGTGACACCAT | 40 | 1944 |
| 696683 | 26101 | 26116 | ATCCAAGCAATTCTAT | 5 | 1945 |
| 696684 | 26252 | 26267 | CCCTCAAAGAAATAGA | 11 | 1946 |
| 696685 | 26395 | 26410 | TATTACTAGACTATAC | 0 | 1947 |
| 696686 | 26396 | 26411 | CTATTACTAGACTATA | 0 | 1948 |
| 696687 | 26489 | 26504 | CCATTAGCTGGGTAAA | 31 | 1949 |
| 696688 | 26520 | 26535 | CAGAATTGGCTCAAAT | 13 | 1950 |
| 696689 | 26910 | 26925 | TTAATATGCAGGTAGA | 43 | 1951 |
| 696690 | 26921 | 26936 | AACCTAATAGGTTAAT | 4 | 1952 |
| 696691 | 26939 | 26954 | GAAGTATAGTAAAACT | 23 | 1953 |
| 696692 | 27497 | 27512 | AGCCAAAAGCAGTACC | 64 | 1954 |
| 696693 | 28073 | 28088 | TAGAAAGTATCCCTGT | 21 | 1955 |
| 696694 | 28150 | 28165 | GGTTATACTACCAAGG | 46 | 1956 |
| 696695 | 28205 | 28220 | ACAGGTTTGTATCCCT | 48 | 1957 |
| 696696 | 28230 | 28245 | AGTCATTAGTACAGTT | 44 | 1958 |
| 696697 | 28284 | 28299 | CCAAGTGTAGGTTTAG | 58 | 1959 |
| 696698 | 28347 | 28362 | AGTAAAGTAAGGTTAA | 24 | 1960 |
| 696699 | 28799 | 28814 | GTATAATGGTATAGCA | 50 | 1961 |
| 696700 | 28874 | 28889 | TAACACTGTAGTACGA | 10 | 1962 |
| 696701 | 29016 | 29031 | TATAGATGGATCAATT | 28 | 1963 |
| 696702 | 29038 | 29053 | AGCCCTAAACAAATTG | 36 | 1964 |
| 696703 | 29443 | 29458 | GTAAAGTGATATATGA | 22 | 1965 |
| 696704 | 30003 | 30018 | CTCTTTTTATGTCCTC | 56 | 1966 |
| 696705 | 30110 | 30125 | ATTAGTACTTCTGAGG | 41 | 1967 |
| 696706 | 30205 | 30220 | CCTAAAAATCTCTTAT | 0 | 1968 |
| 696707 | 30356 | 30371 | AAGTATTCTTTCATAC | 5 | 1969 |
| 696708 | 30418 | 30433 | TACATAATAACATCAG | 24 | 1970 |
| 696709 | 30590 | 30605 | CTTTAAAGTCTTCCAG | 43 | 1971 |
| 696710 | 30673 | 30688 | ATTTTCACCAGTAACT | 19 | 1972 |
| 696711 | 30706 | 30721 | TAACAAAATACTCTGC | 0 | 1973 |
| 696712 | 31090 | 31105 | GCACACTAATTTTGTT | 41 | 1974 |
| 696713 | 31124 | 31139 | AAAACAACTTGCCGAT | 52 | 1975 |
| 696714 | 31150 | 31165 | GATCAAGACCCCAAAA | 26 | 1976 |
| 696715 | 31361 | 31376 | AACGATTTTTGCATTT | 52 | 1977 |
| 696716 | 31759 | 31774 | ACTAAAGTTACCCAGA | 38 | 1978 |
| 696717 | 31816 | 31831 | TTAAAGTTAGCCTGTA | 29 | 1979 |
| 696718 | 32195 | 32210 | AAATACTAGAGACCAG | 0 | 1980 |
| 696719 | 32583 | 32598 | TATGTAACGCATTATA | 36 | 1981 |
| 696720 | 32735 | 32750 | GTCCAAAGGGACCAGG | 31 | 1982 |
| 696721 | 32833 | 32848 | AACCCTCCCACTTTTG | 17 | 1983 |
| 696722 | 33039 | 33054 | AAAGCATTCTTTAACG | 26 | 1984 |
| 696723 | 33293 | 33308 | ACAAGATGTATTCTAA | 24 | 1985 |
| 696724 | 33365 | 33380 | CAACACATCAAATACC | 22 | 1986 |
| 696725 | 33478 | 33493 | CCAAAGTATCATTCTA | 41 | 1987 |
| 696726 | 33514 | 33529 | GAAACAAAGCACTCCA | 44 | 1988 |
| 696727 | 33551 | 33566 | CTCAACTATTATCTGA | 23 | 1989 |
| 696728 | 33642 | 33657 | CTTTAAGAACAACTGA | 35 | 1990 |
| 696729 | 34076 | 34091 | TAGCACACAATAATTT | 14 | 1991 |
| 696730 | 34367 | 34382 | ATAAGAAACTTAGGTT | 8 | 1992 |
| 696731 | 34412 | 34427 | TAATTAACAGCACAGG | 64 | 1993 |
| 696732 | 34488 | 34503 | TTGGAAGCCAATAATT | 19 | 1994 |

### Example 8: Antisense Inhibition of Human K-Ras in HepG2 Cells by cEt Gapmers

[0364] Antisense oligonucleotides were designed targeting a K-Ras nucleic acid and were tested for their effects on K-Ras mRNA in vitro. Cultured HepG2 cells at a density of 20,000 cells per well were transfected using electroporation with 4,000 nM antisense oligonucleotide. After a treatment period of approximately 24 hours, RNA was isolated from the cells and K-Ras mRNA levels were measured by quantitative real-time PCR. Human primer probe set RTS132 was used to measure mRNA levels. K-Ras mRNA levels were adjusted according to total RNA content, as measured by RIBOGREEN®. Results are presented as percent inhibition of K-Ras, relative to untreated control cells. As used herein, a value of ‘0’ indicates that treatment with the antisense oligonucleotide did not inhibit mRNA levels.

[0365] The newly designed chimeric antisense oligonucleotides in the Tables below were designed as 3-10-3 cEt gapmers. The gapmers are 16 nucleosides in length, wherein the central gap segment comprises of ten 2′-deoxynucleosides and is flanked by wing segments on the 5′ direction and the 3′ direction comprising three nucleosides each. Each nucleoside in the 5′ wing segment and each nucleoside in the 3′ wing segment has a cEt sugar modification. The internucleoside linkages throughout each gapmer are phosphorothioate (P═S) linkages. All cytosine residues throughout each gapmer are 5-methylcytosines. “Start site” indicates the 5′-most nucleoside to which the gapmer is targeted in the human gene sequence. “Stop site” indicates the 3′-most nucleoside to which the gapmer is targeted human gene sequence. Each gapmer listed in the Tables below is targeted to either SEQ ID NO: 1 or SEQ ID NO: 2. Certain antisense oligonucleotides target the target sequence with one mismatch. These antisense oligonucleotides are presented in the Table below with bold underlining on the mismatched nucleoside.

TABLE 30
Inhibition of K-Ras mRNA by 3-10-3 cEt gapmers targeting SEQ ID NO: 1 and 2

| | SEQ ID | SEQ ID | SEQ ID | SEQ ID | | | | |
|---|---|---|---|---|---|---|---|---|
| | NO: 1 | NO: 1 | NO: 2 | NO: 2 | | | | SEQ |
| ISIS | Start | Stop | Start | Stop | | | % | ID |
| NO | Site | Site | Site | Site | Mismatches | Sequence | Inhibition | NO |
| 540737 | 219 | 234 | 7585 | 7600 | 0 | TACGCCACCAGCTCCA | 68 | 1995 |
| 540738 | 220 | 235 | 7586 | 7601 | 0 | CTACGCCACCAGCTCC | 64 | 1996 |
| 540739 | 221 | 236 | 7587 | 7602 | 0 | CCTACGCCACCAGCTC | 86 | 1997 |
| 540740 | 222 | 237 | 7588 | 7603 | 0 | GCCTACGCCACCAGCT | 67 | 1998 |
| 540801 | 2818 | 2833 | 45207 | 45222 | 0 | GTCGCTAATGGATTGG | 85 | 46 |
| 540806 | 2981 | 2996 | 45370 | 45385 | 0 | GCATGAAGATTTCTGG | 52 | 122 |
| 540806 | 2981 | 2996 | 45370 | 45385 | 0 | GCATGAAGATTTCTGG | 85 | 122 |
| 540808 | 3376 | 3391 | 45765 | 45780 | 0 | ATGTCTCTTGTTTGGG | 85 | 123 |
| 651530 | 1313 | 1328 | 43702 | 43717 | 0 | TGACTAATAGCAGTGG | 90 | 239 |
| 651634 | 2634 | 2649 | 45023 | 45038 | 0 | AATCTTATGGTTAGGG | 85 | 316 |
| 651645 | 2733 | 2748 | 45122 | 45137 | 0 | TATCTGTCAGATTCTC | 87 | 321 |
| 651733 | 3893 | 3908 | 46282 | 46297 | 0 | GGTACTGTGTAAGTCT | 90 | 1352 |
| 651972 | 1213 | 1228 | 43602 | 43617 | 0 | TCATCAGGAAGCCCAT | 79 | 226 |
| 651987 | 1447 | 1462 | 43836 | 43851 | 0 | GCTATTAGGAGTCTTT | 89 | 272 |
| 651990 | 1493 | 1508 | 43882 | 43897 | 0 | GCTATAATAATCCCCA | 88 | 275 |
| 652004 | 1685 | 1700 | 44074 | 44089 | 0 | TTAATGTCACAAGCAG | 92 | 289 |
| 652019 | 1918 | 1933 | 44307 | 44322 | 0 | CTTGATTTGTCAGCAG | 92 | 304 |
| 652132 | 4036 | 4051 | 46425 | 46440 | 0 | ACCATTCAAAGTTCAC | 88 | 975 |
| 663454 | 225 | 240 | 7591 | 7606 | 0 | CTTGCCTACGCCACCA | 66 | 1999 |
| 667541 | 211 | 226 | 7577 | 7592 | 0 | CAGCTCCAACTACCAC | 87 | 2000 |
| 667542 | 212 | 227 | 7578 | 7593 | 0 | CCAGCTCCAACTACCA | 81 | 2001 |
| 667543 | 213 | 228 | 7579 | 7594 | 0 | ACCAGCTCCAACTACC | 76 | 2002 |
| 667544 | 214 | 229 | 7580 | 7595 | 0 | CACCAGCTCCAACTAC | 64 | 2003 |
| 667545 | 215 | 230 | 7581 | 7596 | 0 | CCACCAGCTCCAACTA | 70 | 2004 |
| 667546 | 216 | 231 | 7582 | 7597 | 0 | GCCACCAGCTCCAACT | 70 | 2005 |
| 667547 | 217 | 232 | 7583 | 7598 | 0 | CGCCACCAGCTCCAAC | 78 | 2006 |
| 667548 | 218 | 233 | 7584 | 7599 | 0 | ACGCCACCAGCTCCAA | 89 | 2007 |
| 667549 | 223 | 238 | 7589 | 7604 | 0 | TGCCTACGCCACCAGC | 78 | 2008 |
| 667550 | 224 | 239 | 7590 | 7605 | 0 | TTGCCTACGCCACCAG | 82 | 550 |
| 667551 | 226 | 241 | 7592 | 7607 | 0 | TCTTGCCTACGCCACC | 67 | 2009 |
| 667552 | 227 | 242 | 7593 | 7608 | 0 | CTCTTGCCTACGCCAC | 74 | 2010 |
| 667553 | 211 | 226 | 7577 | 7592 | 1 | AAGCTCCAACTACCAC | 81 | 2011 |
| 667554 | 212 | 227 | 7578 | 7593 | 1 | CAAGCTCCAACTACCA | 82 | 2012 |
| 667555 | 213 | 228 | 7579 | 7594 | 1 | ACAAGCTCCAACTACC | 41 | 2013 |
| 667556 | 214 | 229 | 7580 | 7595 | 1 | CACAAGCTCCAACTAC | 34 | 2014 |
| 667557 | 215 | 230 | 7581 | 7596 | 1 | CCACAAGCTCCAACTA | 49 | 2015 |
| 667558 | 216 | 231 | 7582 | 7597 | 1 | GCCACAAGCTCCAACT | 47 | 2016 |
| 667559 | 217 | 232 | 7583 | 7598 | 1 | CGCCACAAGCTCCAAC | 55 | 2017 |
| 667560 | 218 | 233 | 7584 | 7599 | 1 | ACGCCACAAGCTCCAA | 64 | 2018 |
| 667561 | 219 | 234 | 7585 | 7600 | 1 | TACGCCACAAGCTCCA | 72 | 2019 |
| 667562 | 220 | 235 | 7586 | 7601 | 1 | CTACGCCACAAGCTCC | 60 | 2020 |
| 667563 | 221 | 236 | 7587 | 7602 | 1 | CCTACGCCACAAGCTC | 56 | 2021 |
| 667564 | 222 | 237 | 7588 | 7603 | 1 | GCCTACGCCACAAGCT | 47 | 2022 |
| 667565 | 223 | 238 | 7589 | 7604 | 1 | TGCCTACGCCACAAGC | 47 | 2023 |
| 667566 | 224 | 239 | 7590 | 7605 | 1 | TTGCCTACGCCACAAG | 62 | 2024 |
| 667567 | 225 | 240 | 7591 | 7606 | 1 | CTTGCCTACGCCACAA | 62 | 2025 |
| 667568 | 226 | 241 | 7592 | 7607 | 1 | TCTTGCCTACGCCACA | 73 | 2026 |
| 667569 | 212 | 227 | 7578 | 7593 | 1 | TCAGCTCCAACTACCA | 79 | 2027 |
| 667570 | 213 | 228 | 7579 | 7594 | 1 | ATCAGCTCCAACTACC | 61 | 2028 |
| 667571 | 214 | 229 | 7580 | 7595 | 1 | CATCAGCTCCAACTAC | 28 | 2029 |
| 667572 | 215 | 230 | 7581 | 7596 | 1 | CCATCAGCTCCAACTA | 36 | 2030 |
| 667573 | 216 | 231 | 7582 | 7597 | 1 | GCCATCAGCTCCAACT | 6 | 2031 |
| 667574 | 217 | 232 | 7583 | 7598 | 1 | CGCCATCAGCTCCAAC | 16 | 2032 |
| 667575 | 218 | 233 | 7584 | 7599 | 1 | ACGCCATCAGCTCCAA | 57 | 2033 |
| 667576 | 219 | 234 | 7585 | 7600 | 1 | TACGCCATCAGCTCCA | 57 | 2034 |
| 667577 | 220 | 235 | 7586 | 7601 | 1 | CTACGCCATCAGCTCC | 58 | 2035 |
| 667578 | 221 | 236 | 7587 | 7602 | 1 | CCTACGCCATCAGCTC | 58 | 2036 |
| 667579 | 222 | 237 | 7588 | 7603 | 1 | GCCTACGCCATCAGCT | 0 | 2037 |
| 667580 | 223 | 238 | 7589 | 7604 | 1 | TGCCTACGCCATCAGC | 40 | 2038 |
| 667581 | 224 | 239 | 7590 | 7605 | 1 | TTGCCTACGCCATCAG | 58 | 2039 |
| 667582 | 225 | 240 | 7591 | 7606 | 1 | CTTGCCTACGCCATCA | 53 | 2040 |
| 667583 | 226 | 241 | 7592 | 7607 | 1 | TCTTGCCTACGCCATC | 58 | 2041 |
| 667584 | 227 | 242 | 7593 | 7608 | 1 | CTCTTGCCTACGCCAT | 73 | 2042 |
| 667585 | 212 | 227 | 7578 | 7593 | 1 | ACAGCTCCAACTACCA | 83 | 2043 |
| 667586 | 213 | 228 | 7579 | 7594 | 1 | AACAGCTCCAACTACC | 62 | 2044 |
| 667587 | 214 | 229 | 7580 | 7595 | 1 | CAACAGCTCCAACTAC | 28 | 2045 |
| 667588 | 215 | 230 | 7581 | 7596 | 1 | CCAACAGCTCCAACTA | 35 | 2046 |
| 667589 | 216 | 231 | 7582 | 7597 | 1 | GCCAACAGCTCCAACT | 26 | 2047 |
| 667590 | 217 | 232 | 7583 | 7598 | 1 | CGCCAACAGCTCCAAC | 37 | 2048 |
| 667591 | 218 | 233 | 7584 | 7599 | 1 | ACGCCAACAGCTCCAA | 83 | 2049 |
| 667592 | 219 | 234 | 7585 | 7600 | 1 | TACGCCAACAGCTCCA | 77 | 2050 |
| 667593 | 220 | 235 | 7586 | 7601 | 1 | CTACGCCAACAGCTCC | 70 | 2051 |
| 667594 | 221 | 236 | 7587 | 7602 | 1 | CCTACGCCAACAGCTC | 64 | 2052 |
| 667595 | 222 | 237 | 7588 | 7603 | 1 | GCCTACGCCAACAGCT | 29 | 2053 |
| 667596 | 223 | 238 | 7589 | 7604 | 1 | TGCCTACGCCAACAGC | 24 | 2054 |
| 667597 | 224 | 239 | 7590 | 7605 | 1 | TTGCCTACGCCAACAG | 51 | 2055 |
| 667598 | 225 | 240 | 7591 | 7606 | 1 | CTTGCCTACGCCAACA | 45 | 2056 |
| 667599 | 226 | 241 | 7592 | 7607 | 1 | TCTTGCCTACGCCAAC | 63 | 2057 |
| 667600 | 227 | 242 | 7593 | 7608 | 1 | CTCTTGCCTACGCCAA | 72 | 2058 |

### Example 9: Antisense Inhibition of Human K-Ras in A431 Cells

[0366] Antisense oligonucleotides were designed targeting a K-Ras nucleic acid and were tested for their effects on K-Ras mRNA in vitro. The antisense oligonucleotides were tested in a series of experiments that had similar culture conditions. The results for each experiment are presented in separate tables shown below. Cultured A431cells at a density of 5,000 cells per well were treated with 2,000 nM antisense oligonucleotide by free uptake. After a treatment period of approximately 24 hours, RNA was isolated from the cells and K-Ras mRNA levels were measured by quantitative real-time PCR. Human primer probe set RTS3496_MGB was used to measure mRNA levels. K-Ras mRNA levels were adjusted according to total RNA content, as measured by RIBOGREEN®. Results are presented as percent inhibition of K-Ras, relative to untreated control cells. As used herein, a value of ‘0’ indicates that treatment with the antisense oligonucleotide did not inhibit mRNA levels.

[0367] The newly designed chimeric antisense oligonucleotides in the Tables below were designed as 3-10-3 cEt gapmers or deoxy, MOE, and (S)-cEt gapmers. The 3-10-3 cEt gapmers are 16 nucleosides in length, wherein the central gap segment comprises of ten 2′-deoxynucleosides and is flanked by wing segments on the 5′ direction and the 3′ direction comprising three nucleosides each. The deoxy, MOE and (S)-cEt oligonucleotides are 16 nucleosides in length wherein the nucleoside have either a MOE sugar modification, an (S)-cEt sugar modification, or a deoxy modification. The ‘Chemistry’ column describes the sugar modifications of each oligonucleotide. ‘k’ indicates an (S)-cEt sugar modification; ‘d’ indicates deoxyribose; the number after ‘d’ indicates the number of deoxynucleosides; and ‘e’ indicates a MOE modification. The internucleoside linkages throughout each gapmer are phosphorothioate (P═S) linkages. All cytosine residues throughout each gapmer are 5-methylcytosines. “Start site” indicates the 5′-most nucleoside to which the gapmer is targeted in the human gene sequence. “Stop site” indicates the 3′-most nucleoside to which the gapmer is targeted human gene sequence. Each gapmer listed in the Tables below is targeted to either SEQ ID NO: 1 or SEQ ID NO: 2. ‘N/A’ indicates that the antisense oligonucleotide does not target that particular gene sequence with 100% complementarity.

TABLE 31
Inhibition of K-Ras mRNA by gapmers targeting SEQ ID NO: 1 and 2

| | SEQ ID | SEQ ID | SEQ ID | SEQ ID | | | | |
|---|---|---|---|---|---|---|---|---|
| | NO: 1 | NO: 1 | NO: 2 | NO: 2 | | | | SEQ |
| ISIS | Start | Stop | Start | Stop | | | % | ID |
| NO | Site | Site | Site | Site | Sequence | Chemistry | Inhibition | NO |
| 651987 | 1447 | 1462 | 43836 | 43851 | GCTATTAGGAGTCTTT | kkk-d10-kkk | 49 | 272 |
| 651987 | 1447 | 1462 | 43836 | 43851 | GCTATTAGGAGTCTTT | kkk-d10-kkk | 62 | 272 |
| 695867 | 1130 | 1145 | 43519 | 43534 | TCCATTTATGTGACTA | kkk-d10-kkk | 46 | 506 |
| 695924 | 1441 | 1456 | 43830 | 43845 | AGGAGTCTTTATAGTA | kkk-d10-kkk | 65 | 420 |
| 695998 | 1790 | 1805 | 44179 | 44194 | ATGCTGTGAAACTCTC | kkk-d10-kkk | 52 | 658 |
| 696017 | 1917 | 1932 | 44306 | 44321 | TTGATTTGTCAGCAGG | kkk-d10-kkk | 66 | 677 |
| 696044 | 2115 | 2130 | 44504 | 44519 | GTGTTTATGCAATGTT | kkk-d10-kkk | 74 | 715 |
| 696091 | 2436 | 2451 | 44825 | 44840 | AGATTGTGCTGAGCTT | kkk-d10-kkk | 29 | 762 |
| 696096 | 2463 | 2478 | 44852 | 44867 | ATGGTGTAACATAGGT | kkk-d10-kkk | 47 | 914 |
| 696152 | 2761 | 2776 | 45150 | 45165 | TTAGTGATTAGGTCAA | kkk-d10-kkk | 51 | 924 |
| 716764 | 1917 | 1932 | 44306 | 44321 | TTGATTTGTCAGCAGG | kkk-d9-kkke | 30 | 890 |
| 716769 | 1917 | 1932 | 44306 | 44321 | TTGATTTGTCAGCAGG | kk-d10-keke | 45 | 892 |
| 716774 | 1917 | 1932 | 44306 | 44321 | TTGATTTGTCAGCAGG | kk-d9-kekek | 22 | 894 |
| 716779 | 1917 | 1932 | 44306 | 44321 | TTGATTTGTCAGCAGG | kk-d8-kekekk | 0 | 896 |
| 716789 | 1917 | 1932 | 44306 | 44321 | TTGATTTGTCAGCAGG | kkk-d8-kekek | 12 | 900 |
| 716804 | 1916 | 1931 | 44305 | 44320 | TGATTTGTCAGCAGGA | kk-d8-kekekk | 17 | 906 |
| 740162 | 1128 | 1143 | 43517 | 43532 | CATTTATGTGACTAGA | k-d10-kekek | 24 | 2059 |
| 740163 | 1439 | 1454 | 43828 | 43843 | GAGTCTTTATAGTAAT | k-d10-kekek | 11 | 2060 |
| 740164 | 1915 | 1930 | 44304 | 44319 | GATTTGTCAGCAGGAC | k-d10-kekek | 57 | 2061 |
| 740168 | 1130 | 1145 | 43519 | 43534 | TCCATTTATGTGACTA | k-d10-kekek | 38 | 2062 |
| 740169 | 1441 | 1456 | 43830 | 43845 | AGGAGTCTTTATAGTA | k-d10-kekek | 31 | 2063 |
| 740170 | 1917 | 1932 | 44306 | 44321 | TTGATTTGTCAGCAGG | k-d10-kekek | 17 | 2064 |
| 740174 | 1128 | 1143 | 43517 | 43532 | CATTTATGTGACTAGA | k-d9-kekeke | 24 | 2065 |
| 740175 | 1439 | 1454 | 43828 | 43843 | GAGTCTTTATAGTAAT | k-d9-kekeke | 21 | 2066 |
| 740176 | 1915 | 1930 | 44304 | 44319 | GATTTGTCAGCAGGAC | k-d9-kekeke | 32 | 2067 |
| 740180 | 1130 | 1145 | 43519 | 43534 | TCCATTTATGTGACTA | k-d9-kekeke | 15 | 2068 |
| 740181 | 1441 | 1456 | 43830 | 43845 | AGGAGTCTTTATAGTA | k-d9-kekeke | 24 | 2069 |
| 740182 | 1917 | 1932 | 44306 | 44321 | TTGATTTGTCAGCAGG | k-d9-kekeke | 22 | 2070 |
| 740186 | 1129 | 1144 | 43518 | 43533 | CCATTTATGTGACTAG | kk-d10-keke | 46 | 2071 |
| 740187 | 1440 | 1455 | 43829 | 43844 | GGAGTCTTTATAGTAA | kk-d10-keke | 55 | 2072 |
| 740188 | 1916 | 1931 | 44305 | 44320 | TGATTTGTCAGCAGGA | kk-d10-keke | 55 | 2073 |
| 740192 | 1130 | 1145 | 43519 | 43534 | TCCATTTATGTGACTA | kk-d10-keke | 22 | 2074 |
| 740193 | 1441 | 1456 | 43830 | 43845 | AGGAGTCTTTATAGTA | kk-d10-keke | 40 | 2075 |
| 740197 | 1129 | 1144 | 43518 | 43533 | CCATTTATGTGACTAG | kk-d8-kekekk | 0 | 2076 |
| 740198 | 1440 | 1455 | 43829 | 43844 | GGAGTCTTTATAGTAA | kk-d8-kekekk | 25 | 2077 |
| 740202 | 1130 | 1145 | 43519 | 43534 | TCCATTTATGTGACTA | kk-d8-kekekk | 29 | 2078 |
| 740203 | 1441 | 1456 | 43830 | 43845 | AGGAGTCTTTATAGTA | kk-d8-kekekk | 21 | 2079 |
| 740207 | 1129 | 1144 | 43518 | 43533 | CCATTTATGTGACTAG | kk-d9-kdkdk | 43 | 2080 |
| 740208 | 1440 | 1455 | 43829 | 43844 | GGAGTCTTTATAGTAA | kk-d9-kdkdk | 29 | 2081 |
| 740209 | 1916 | 1931 | 44305 | 44320 | TGATTTGTCAGCAGGA | kk-d9-kdkdk | 15 | 2082 |
| 740213 | 1129 | 1144 | 43518 | 43533 | CCATTTATGTGACTAG | kk-d9-kekek | 25 | 2083 |
| 740214 | 1440 | 1455 | 43829 | 43844 | GGAGTCTTTATAGTAA | kk-d9-kekek | 21 | 2084 |
| 740215 | 1916 | 1931 | 44305 | 44320 | TGATTTGTCAGCAGGA | kk-d9-kekek | 45 | 2085 |
| 740219 | 1130 | 1145 | 43519 | 43534 | TCCATTTATGTGACTA | kk-d9-kekek | 32 | 2086 |
| 740220 | 1441 | 1456 | 43830 | 43845 | AGGAGTCTTTATAGTA | kk-d9-kekek | 31 | 2087 |
| 740224 | 1128 | 1143 | 43517 | 43532 | CATTTATGTGACTAGA | kk-d8-kekekk | 20 | 2088 |
| 740225 | 1439 | 1454 | 43828 | 43843 | GAGTCTTTATAGTAAT | kk-d8-kekekk | 0 | 2089 |
| 740226 | 1915 | 1930 | 44304 | 44319 | GATTTGTCAGCAGGAC | kk-d8-kekekk | 0 | 2090 |
| 740230 | 1130 | 1145 | 43519 | 43534 | TCCATTTATGTGACTA | kkk-d8-kdkdk | 16 | 2091 |
| 740231 | 1441 | 1456 | 43830 | 43845 | AGGAGTCTTTATAGTA | kkk-d8-kdkdk | 30 | 2092 |
| 740232 | 1917 | 1932 | 44306 | 44321 | TTGATTTGTCAGCAGG | kkk-d8-kdkdk | 19 | 2093 |
| 740236 | 1130 | 1145 | 43519 | 43534 | TCCATTTATGTGACTA | kkk-d8-kekek | 0 | 2094 |
| 740237 | 1441 | 1456 | 43830 | 43845 | AGGAGTCTTTATAGTA | kkk-d8-kekek | 22 | 2095 |
| 740241 | 1129 | 1144 | 43518 | 43533 | CCATTTATGTGACTAG | kkk-d8-kekek | 36 | 2096 |
| 740242 | 1440 | 1455 | 43829 | 43844 | GGAGTCTTTATAGTAA | kkk-d8-kekek | 0 | 2097 |
| 740243 | 1916 | 1931 | 44305 | 44320 | TGATTTGTCAGCAGGA | kkk-d8-kekek | 41 | 2098 |
| 740247 | 1130 | 1145 | 43519 | 43534 | TCCATTTATGTGACTA | kkk-d9-keke | 8 | 2099 |
| 740248 | 1441 | 1456 | 43830 | 43845 | AGGAGTCTTTATAGTA | kkk-d9-keke | 31 | 2100 |
| 740249 | 1917 | 1932 | 44306 | 44321 | TTGATTTGTCAGCAGG | kkk-d9-keke | 40 | 2101 |
| 740253 | 1129 | 1144 | 43518 | 43533 | CCATTTATGTGACTAG | kkk-d9-kkke | 49 | 2102 |
| 740254 | 1440 | 1455 | 43829 | 43844 | GGAGTCTTTATAGTAA | kkk-d9-kkke | 41 | 2103 |
| 740255 | 1916 | 1931 | 44305 | 44320 | TGATTTGTCAGCAGGA | kkk-d9-kkke | 63 | 2104 |
| 740259 | 1130 | 1145 | 43519 | 43534 | TCCATTTATGTGACTA | kkk-d9-kkke | 23 | 2105 |
| 740260 | 1441 | 1456 | 43830 | 43845 | AGGAGTCTTTATAGTA | kkk-d9-kkke | 6 | 2106 |
| 740273 | 1788 | 1803 | 44177 | 44192 | GCTGTGAAACTCTCTA | k-d10-kekek | 41 | 2107 |
| 740275 | 1790 | 1805 | 44179 | 44194 | ATGCTGTGAAACTCTC | k-d10-kekek | 18 | 2108 |
| 740277 | 1788 | 1803 | 44177 | 44192 | GCTGTGAAACTCTCTA | k-d9-kekeke | 2 | 2109 |
| 740279 | 1790 | 1805 | 44179 | 44194 | ATGCTGTGAAACTCTC | k-d9-kekeke | 24 | 2110 |
| 740281 | 1789 | 1804 | 44178 | 44193 | TGCTGTGAAACTCTCT | kk-d10-keke | 30 | 2111 |
| 740283 | 1790 | 1805 | 44179 | 44194 | ATGCTGTGAAACTCTC | kk-d10-keke | 35 | 2112 |
| 740285 | 1788 | 1803 | 44177 | 44192 | GCTGTGAAACTCTCTA | kk-d8-kekekk | 16 | 2113 |
| 740287 | 1789 | 1804 | 44178 | 44193 | TGCTGTGAAACTCTCT | kk-d8-kekekk | 5 | 2114 |
| 740289 | 1790 | 1805 | 44179 | 44194 | ATGCTGTGAAACTCTC | kk-d8-kekekk | 25 | 2115 |
| 740291 | 1789 | 1804 | 44178 | 44193 | TGCTGTGAAACTCTCT | kk-d9-kdkdk | 26 | 2116 |
| 740293 | 1789 | 1804 | 44178 | 44193 | TGCTGTGAAACTCTCT | kk-d9-kekek | 0 | 2117 |
| 740295 | 1790 | 1805 | 44179 | 44194 | ATGCTGTGAAACTCTC | kk-d9-kekek | 16 | 2118 |
| 740297 | 1790 | 1805 | 44179 | 44194 | ATGCTGTGAAACTCTC | kkk-d9-keke | 2 | 2119 |
| 740299 | 1789 | 1804 | 44178 | 44193 | TGCTGTGAAACTCTCT | kkk-d9-kkke | 23 | 2120 |
| 740301 | 1790 | 1805 | 44179 | 44194 | ATGCTGTGAAACTCTC | kkk-d9-kkke | 37 | 2121 |

TABLE 32
Inhibition of K-Ras mRNA by gapmers targeting SEQ ID NO: 1 and 2

| | SEQ ID | SEQ ID | SEQ ID | SEQ ID | | | | |
|---|---|---|---|---|---|---|---|---|
| | NO: 1 | NO: 1 | NO: 2 | NO: 2 | | | | SEQ |
| ISIS | Start | Stop | Start | Stop | | | % | ID |
| NO | Site | Site | Site | Site | Sequence | Chemistry | Inhibition | NO |
| 651987 | 1447 | 1462 | 43836 | 43851 | GCTATTAGGAGTCTTT | kkk-d10-kkk | 55 | 272 |
| 651987 | 1447 | 1462 | 43836 | 43851 | GCTATTAGGAGTCTTT | kkk-d10-kkk | 65 | 272 |
| 695867 | 1130 | 1145 | 43519 | 43534 | TCCATTTATGTGACTA | kkk-d10-kkk | 52 | 506 |
| 695924 | 1441 | 1456 | 43830 | 43845 | AGGAGTCTTTATAGTA | kkk-d10-kkk | 57 | 420 |
| 695998 | 1790 | 1805 | 44179 | 44194 | ATGCTGTGAAACTCTC | kkk-d10-kkk | 39 | 658 |
| 696017 | 1917 | 1932 | 44306 | 44321 | TTGATTTGTCAGCAGG | kkk-d10-kkk | 74 | 677 |
| 696044 | 2115 | 2130 | 44504 | 44519 | GTGTTTATGCAATGTT | kkk-d10-kkk | 60 | 715 |
| 696091 | 2436 | 2451 | 44825 | 44840 | AGATTGTGCTGAGCTT | kkk-d10-kkk | 11 | 762 |
| 696096 | 2463 | 2478 | 44852 | 44867 | ATGGTGTAACATAGGT | kkk-d10-kkk | 52 | 914 |
| 696152 | 2761 | 2776 | 45150 | 45165 | TTAGTGATTAGGTCAA | kkk-d10-kkk | 52 | 924 |
| 740165 | 2113 | 2128 | 44502 | 44517 | GTTTATGCAATGTTAA | k-d10-kekek | 37 | 2122 |
| 740166 | 2434 | 2449 | 44823 | 44838 | ATTGTGCTGAGCTTGA | k-d10-kekek | 34 | 2123 |
| 740167 | 2461 | 2476 | 44850 | 44865 | GGTGTAACATAGGTTA | k-d10-kekek | 64 | 2124 |
| 740171 | 2115 | 2130 | 44504 | 44519 | GTGTTTATGCAATGTT | k-d10-kekek | 53 | 2125 |
| 740172 | 2436 | 2451 | 44825 | 44840 | AGATTGTGCTGAGCTT | k-d10-kekek | 7 | 2126 |
| 740173 | 2463 | 2478 | 44852 | 44867 | ATGGTGTAACATAGGT | k-d10-kekek | 47 | 2127 |
| 740177 | 2113 | 2128 | 44502 | 44517 | GTTTATGCAATGTTAA | k-d9-kekeke | 31 | 2128 |
| 740178 | 2434 | 2449 | 44823 | 44838 | ATTGTGCTGAGCTTGA | k-d9-kekeke | 18 | 2129 |
| 740179 | 2461 | 2476 | 44850 | 44865 | GGTGTAACATAGGTTA | k-d9-kekeke | 57 | 2130 |
| 740183 | 2115 | 2130 | 44504 | 44519 | GTGTTTATGCAATGTT | k-d9-kekeke | 41 | 2131 |
| 740184 | 2436 | 2451 | 44825 | 44840 | AGATTGTGCTGAGCTT | k-d9-kekeke | 0 | 2132 |
| 740185 | 2463 | 2478 | 44852 | 44867 | ATGGTGTAACATAGGT | k-d9-kekeke | 39 | 2133 |
| 740189 | 2114 | 2129 | 44503 | 44518 | TGTTTATGCAATGTTA | kk-d10-keke | 23 | 2134 |
| 740190 | 2435 | 2450 | 44824 | 44839 | GATTGTGCTGAGCTTG | kk-d10-keke | 19 | 2135 |
| 740191 | 2462 | 2477 | 44851 | 44866 | TGGTGTAACATAGGTT | kk-d10-keke | 67 | 2136 |
| 740194 | 2115 | 2130 | 44504 | 44519 | GTGTTTATGCAATGTT | kk-d10-keke | 73 | 2137 |
| 740195 | 2436 | 2451 | 44825 | 44840 | AGATTGTGCTGAGCTT | kk-d10-keke | 40 | 2138 |
| 740196 | 2463 | 2478 | 44852 | 44867 | ATGGTGTAACATAGGT | kk-d10-keke | 65 | 2139 |
| 740199 | 2114 | 2129 | 44503 | 44518 | TGTTTATGCAATGTTA | kk-d8-kekekk | 56 | 2140 |
| 740200 | 2435 | 2450 | 44824 | 44839 | GATTGTGCTGAGCTTG | kk-d8-kekekk | 14 | 2141 |
| 740201 | 2462 | 2477 | 44851 | 44866 | TGGTGTAACATAGGTT | kk-d8-kekekk | 55 | 2142 |
| 740204 | 2115 | 2130 | 44504 | 44519 | GTGTTTATGCAATGTT | kk-d8-kekekk | 9 | 2143 |
| 740205 | 2436 | 2451 | 44825 | 44840 | AGATTGTGCTGAGCTT | kk-d8-kekekk | 0 | 2144 |
| 740206 | 2463 | 2478 | 44852 | 44867 | ATGGTGTAACATAGGT | kk-d8-kekekk | 40 | 2145 |
| 740210 | 2114 | 2129 | 44503 | 44518 | TGTTTATGCAATGTTA | kk-d9-kdkdk | 46 | 2146 |
| 740211 | 2435 | 2450 | 44824 | 44839 | GATTGTGCTGAGCTTG | kk-d9-kdkdk | 57 | 2147 |
| 740212 | 2462 | 2477 | 44851 | 44866 | TGGTGTAACATAGGTT | kk-d9-kdkdk | 57 | 2148 |
| 740216 | 2114 | 2129 | 44503 | 44518 | TGTTTATGCAATGTTA | kk-d9-kekek | 56 | 2149 |
| 740217 | 2435 | 2450 | 44824 | 44839 | GATTGTGCTGAGCTTG | kk-d9-kekek | 45 | 2150 |
| 740218 | 2462 | 2477 | 44851 | 44866 | TGGTGTAACATAGGTT | kk-d9-kekek | 62 | 2151 |
| 740221 | 2115 | 2130 | 44504 | 44519 | GTGTTTATGCAATGTT | kk-d9-kekek | 65 | 2152 |
| 740222 | 2436 | 2451 | 44825 | 44840 | AGATTGTGCTGAGCTT | kk-d9-kekek | 38 | 2153 |
| 740223 | 2463 | 2478 | 44852 | 44867 | ATGGTGTAACATAGGT | kk-d9-kekek | 53 | 2154 |
| 740227 | 2113 | 2128 | 44502 | 44517 | GTTTATGCAATGTTAA | kk-d8-kekekk | 57 | 2155 |
| 740228 | 2434 | 2449 | 44823 | 44838 | ATTGTGCTGAGCTTGA | kk-d8-kekekk | 31 | 2156 |
| 740229 | 2461 | 2476 | 44850 | 44865 | GGTGTAACATAGGTTA | kk-d8-kekekk | 54 | 2157 |
| 740233 | 2115 | 2130 | 44504 | 44519 | GTGTTTATGCAATGTT | kkk-d8-kdkdk | 65 | 2158 |
| 740234 | 2436 | 2451 | 44825 | 44840 | AGATTGTGCTGAGCTT | kkk-d8-kdkdk | 42 | 2159 |
| 740235 | 2463 | 2478 | 44852 | 44867 | ATGGTGTAACATAGGT | kkk-d8-kdkdk | 36 | 2160 |
| 740238 | 2115 | 2130 | 44504 | 44519 | GTGTTTATGCAATGTT | kkk-d8-kekek | 66 | 2161 |
| 740239 | 2436 | 2451 | 44825 | 44840 | AGATTGTGCTGAGCTT | kkk-d8-kekek | 26 | 2162 |
| 740240 | 2463 | 2478 | 44852 | 44867 | ATGGTGTAACATAGGT | kkk-d8-kekek | 43 | 2163 |
| 740244 | 2114 | 2129 | 44503 | 44518 | TGTTTATGCAATGTTA | kkk-d8-kekek | 52 | 2164 |
| 740245 | 2435 | 2450 | 44824 | 44839 | GATTGTGCTGAGCTTG | kkk-d8-kekek | 37 | 2165 |
| 740246 | 2462 | 2477 | 44851 | 44866 | TGGTGTAACATAGGTT | kkk-d8-kekek | 67 | 2166 |
| 740250 | 2115 | 2130 | 44504 | 44519 | GTGTTTATGCAATGTT | kkk-d9-keke | 66 | 2167 |
| 740251 | 2436 | 2451 | 44825 | 44840 | AGATTGTGCTGAGCTT | kkk-d9-keke | 43 | 2168 |
| 740252 | 2463 | 2478 | 44852 | 44867 | ATGGTGTAACATAGGT | kkk-d9-keke | 43 | 2169 |
| 740256 | 2114 | 2129 | 44503 | 44518 | TGTTTATGCAATGTTA | kkk-d9-kkke | 72 | 2170 |
| 740257 | 2435 | 2450 | 44824 | 44839 | GATTGTGCTGAGCTTG | kkk-d9-kkke | 30 | 2171 |
| 740258 | 2462 | 2477 | 44851 | 44866 | TGGTGTAACATAGGTT | kkk-d9-kkke | 56 | 2172 |
| 740261 | 2115 | 2130 | 44504 | 44519 | GTGTTTATGCAATGTT | kkk-d9-kkke | 59 | 2173 |
| 740262 | 2436 | 2451 | 44825 | 44840 | AGATTGTGCTGAGCTT | kkk-d9-kkke | 42 | 2174 |
| 740263 | 2463 | 2478 | 44852 | 44867 | ATGGTGTAACATAGGT | kkk-d9-kkke | 47 | 2175 |
| 740274 | 2759 | 2774 | 45148 | 45163 | AGTGATTAGGTCAAAT | k-d10-kekek | 21 | 2176 |
| 740276 | 2761 | 2776 | 45150 | 45165 | TTAGTGATTAGGTCAA | k-d10-kekek | 12 | 2177 |
| 740278 | 2759 | 2774 | 45148 | 45163 | AGTGATTAGGTCAAAT | k-d9-kekeke | 12 | 2178 |
| 740280 | 2761 | 2776 | 45150 | 45165 | TTAGTGATTAGGTCAA | k-d9-kekeke | 0 | 2179 |
| 740282 | 2760 | 2775 | 45149 | 45164 | TAGTGATTAGGTCAAA | kk-d10-keke | 34 | 2180 |
| 740284 | 2761 | 2776 | 45150 | 45165 | TTAGTGATTAGGTCAA | kk-d10-keke | 22 | 2181 |
| 740286 | 2759 | 2774 | 45148 | 45163 | AGTGATTAGGTCAAAT | kk-d8-kekekk | 46 | 2182 |
| 740288 | 2760 | 2775 | 45149 | 45164 | TAGTGATTAGGTCAAA | kk-d8-kekekk | 42 | 2183 |
| 740290 | 2761 | 2776 | 45150 | 45165 | TTAGTGATTAGGTCAA | kk-d8-kekekk | 33 | 2184 |
| 740292 | 2760 | 2775 | 45149 | 45164 | TAGTGATTAGGTCAAA | kk-d9-kdkdk | 25 | 2185 |
| 740294 | 2760 | 2775 | 45149 | 45164 | TAGTGATTAGGTCAAA | kk-d9-kekek | 51 | 2186 |
| 740296 | 2761 | 2776 | 45150 | 45165 | TTAGTGATTAGGTCAA | kk-d9-kekek | 48 | 2187 |
| 740298 | 2761 | 2776 | 45150 | 45165 | TTAGTGATTAGGTCAA | kkk-d9-keke | 32 | 2188 |
| 740300 | 2760 | 2775 | 45149 | 45164 | TAGTGATTAGGTCAAA | kkk-d9-kkke | 43 | 2189 |
| 740302 | 2761 | 2776 | 45150 | 45165 | TTAGTGATTAGGTCAA | kkk-d9-kkke | 53 | 2190 |

### Example 10: Dose-Dependent Inhibition of Human K-Ras mRNA Expression in A431 Cells

[0368] Antisense oligonucleotides described in the studies above were tested at various doses in A431 cells. Isis No. 549148 (3-10-3 cEt gapmer, GGCTACTACGCCGTCA, designated herein as SEQ ID NO: 2191) or ISIS 141923 (5-10-5 MOE gapmer, CCTTCCCTGAAGGTTCCTCC, designated herein as SEQ ID NO: 2192), control oligonucleotides that do not target K-Ras, were included in each experiment as negative controls.

### Study 1

[0369] Cells were plated at a density of 5,000 cells per well. Cells were incubated with concentrations of antisense oligonucleotide specified in the tables below. Each table represents a separate experiment. After approximately 72 hours, RNA was isolated from the cells and K-Ras mRNA levels were measured by quantitative real-time PCR. Human K-Ras primer probe set RTS3496_MGB, described above, was used to measure mRNA levels. K-Ras mRNA levels were normalized to beta-actin mRNA levels or RIBOGREEN©. Results are presented as percent inhibition of K-Ras, relative to untreated control cells. As used herein, a value of ‘0’ indicates that treatment with the antisense oligonucleotide did not inhibit mRNA levels.

[0370] For some antisense oligonucleotides, the half maximal inhibitory concentration (IC₅₀) is also presented. As illustrated in the tables below, oligonucleotides were successfully taken up by the cells and K-Ras mRNA levels were significantly reduced in a dose-dependent manner in antisense oligonucleotide treated cells.

TABLE 33
Dose-dependent inhibition of human K-Ras mRNA expression
by free-uptake of ISIS oligonucleotides

| ISIS. | Inhibition (%) | | | | | IC₅₀ |
|---|---|---|---|---|---|---|
| No | 12.3 nM | 37.0 nM | 111 nM | 333 nM | 1000 nM | (μM) |
| 549148 | 10 | 10 | 8 | 9 | 18 | >1000 |
| 651530 | 24 | 64 | 84 | 92 | 93 | 24 |
| 651555 | 23 | 58 | 73 | 86 | 88 | 30 |
| 651587 | 31 | 68 | 84 | 89 | 91 | 22 |
| 651987 | 51 | 79 | 86 | 90 | 93 | 12 |
| 695785 | 25 | 58 | 75 | 86 | 88 | 30 |
| 695823 | 24 | 46 | 68 | 82 | 89 | 74 |
| 695980 | 44 | 74 | 86 | 92 | 95 | 18 |
| 695995 | 29 | 61 | 81 | 91 | 93 | 24 |

TABLE 34
Dose-dependent inhibition of human K-Ras mRNA expression
by free-uptake of ISIS oligonucleotides

| ISIS | Inhibition (%) | | | | |
|---|---|---|---|---|---|
| No. | 49.4 nM | 148.1 nM | 444.4 nM | 1333 nM | 4000 nM |
| 540806 | 0 | 1 | 54 | 73 | 80 |
| 651530 | 5 | 27 | 62 | 82 | 90 |
| 651634 | 0 | 11 | 59 | 78 | 86 |
| 651645 | 0 | 11 | 26 | 65 | 79 |
| 651733 | 0 | 0 | 25 | 44 | 56 |
| 651760 | 0 | 10 | 61 | 79 | 87 |
| 651972 | 1 | 6 | 38 | 60 | 80 |
| 651987 | 2 | 25 | 71 | 86 | 89 |
| 651990 | 0 | 18 | 46 | 65 | 79 |
| 652004 | 0 | 9 | 55 | 82 | 90 |
| 652019 | 0 | 14 | 53 | 75 | 85 |
| 652028 | 0 | 0 | 31 | 73 | 81 |
| 652034 | 0 | 0 | 35 | 61 | 78 |
| 652100 | 0 | 18 | 47 | 69 | 80 |
| 652132 | 0 | 23 | 61 | 78 | 88 |

TABLE 35
Dose-dependent inhibition of human K-Ras mRNA expression
by free-uptake of ISIS oligonucleotides

| Isis | Inhibition (%) | | | | |
|---|---|---|---|---|---|
| No. | 62 nM | 185 nM | 556 nM | 1667 nM | 5000 nM |
| 141923 | 0 | 0 | 4 | 0 | 22 |
| 651588 | 8 | 13 | 22 | 60 | 75 |
| 651987 | 10 | 33 | 50 | 77 | 83 |
| 651990 | 4 | 1 | 24 | 55 | 68 |
| 652028 | 17 | 5 | 39 | 59 | 72 |
| 716583 | 9 | 34 | 46 | 45 | 70 |
| 716587 | 18 | 18 | 45 | 61 | 74 |
| 716588 | 7 | 24 | 46 | 67 | 77 |
| 716600 | 22 | 30 | 56 | 79 | 83 |
| 716608 | 22 | 36 | 53 | 64 | 75 |
| 716612 | 20 | 28 | 45 | 66 | 75 |
| 716625 | 5 | 28 | 38 | 61 | 82 |
| 716628 | 2 | 19 | 58 | 72 | 81 |
| 716655 | 13 | 21 | 40 | 53 | 79 |
| 716656 | 11 | 27 | 46 | 65 | 83 |
| 716769 | 8 | 25 | 48 | 62 | 83 |

TABLE 36
Dose-dependent inhibition of human K-Ras mRNA expression
by free-uptake of ISIS oligonucleotides

| Isis | Inhibition (%) | | | | IC₅₀ |
|---|---|---|---|---|---|
| No. | 148 nM | 444 nM | 1333 nM | 4000 nM | (μM) |
| 540806 | 15 | 14 | 55 | 62 | 1.7 |
| 651587 | 6 | 32 | 63 | 76 | 1.0 |
| 651990 | 5 | 23 | 34 | 59 | 2.7 |
| 652004 | 3 | 29 | 62 | 73 | 1.1 |
| 663455 | 0 | 23 | 38 | 47 | 3.7 |
| 695815 | 28 | 26 | 40 | 58 | 2.7 |
| 695909 | 0 | 18 | 32 | 50 | 4.0 |
| 695940 | 0 | 11 | 32 | 55 | 3.2 |
| 695958 | 0 | 8 | 33 | 36 | 8.8 |
| 695976 | 3 | 26 | 57 | 73 | 1.2 |
| 695977 | 14 | 19 | 44 | 62 | 2.1 |
| 695980 | 17 | 40 | 60 | 78 | 0.8 |
| 695981 | 1 | 28 | 51 | 65 | 1.6 |
| 695995 | 13 | 22 | 52 | 64 | 1.6 |
| 696105 | 7 | 22 | 45 | 58 | 2.3 |
| 696108 | 3 | 40 | 47 | 65 | 1.5 |
| 696117 | 2 | 17 | 41 | 59 | 2.4 |
| 696160 | 10 | 7 | 15 | 33 | >4 |
| 696176 | 2 | 0 | 0 | 10 | >4 |
| 696289 | 3 | 0 | 0 | 2 | >4 |

TABLE 37
Dose-dependent inhibition of human K-Ras mRNA expression
by free-uptake of ISIS oligonucleotides

| ISIS | Inhibition (%) | | | | |
|---|---|---|---|---|---|
| No. | 19.5 nM | 78.1 nM | 312.5 nM | 1250 nM | 5000 nM |
| 141923 | 10 | 15 | 12 | 0 | 14 |
| 651530 | 59 | 86 | 93 | 95 | 96 |
| 651555 | 49 | 83 | 93 | 96 | 96 |
| 651587 | 53 | 85 | 93 | 95 | 96 |
| 651987 | 73 | 91 | 94 | 95 | 95 |
| 695785 | 40 | 82 | 94 | 96 | 97 |
| 695980 | 52 | 85 | 95 | 96 | 97 |
| 695995 | 53 | 82 | 93 | 95 | 96 |

TABLE 38
Dose-dependent inhibition of human K-Ras mRNA expression
by free-uptake of ISIS oligonucleotides

| | Inhibition (%) | | | | | |
|---|---|---|---|---|---|---|
| ISIS | 19.5 | 78.1 | 312.5 | 1250 | 5000 | IC₅₀ |
| No. | nM | nM | nM | nM | nM | (μM) |
| 141923 | 0 | 7 | 3 | 0 | 2 | >5 |
| 651530 | 24 | 55 | 82 | 90 | 93 | 0.07 |
| 651555 | 13 | 62 | 80 | 91 | 93 | 0.09 |
| 651587 | 17 | 55 | 76 | 88 | 93 | 0.10 |
| 651987 | 39 | 72 | 87 | 91 | 93 | 0.02 |
| 695785 | 20 | 40 | 71 | 84 | 90 | 0.13 |
| 695980 | 31 | 67 | 86 | 93 | 96 | 0.04 |
| 695995 | 18 | 54 | 78 | 8 | 92 | 0.09 |

TABLE 39
Dose-dependent inhibition of human K-Ras mRNA expression
by free-uptake of ISIS oligonucleotides

| ISIS | Inhibition (%) | | | | | IC₅₀ |
|---|---|---|---|---|---|---|
| No. | 12.3 nM | 37.0 nM | 111 nM | 333 nM | 1000 nM | (μM) |
| 549148 | 0 | 0 | 0 | 0 | 0 | >1000 |
| 651987 | 19 | 41 | 60 | 80 | 92 | 60 |
| 696018 | 23 | 66 | 73 | 80 | 83 | 30 |
| 716744 | 39 | 62 | 76 | 83 | 88 | 20 |
| 716749 | 28 | 51 | 68 | 75 | 81 | 35 |
| 716754 | 27 | 55 | 60 | 70 | 76 | 40 |
| 746273 | 23 | 52 | 67 | 77 | 81 | 35 |
| 746274 | 29 | 49 | 65 | 70 | 74 | 35 |
| 746275 | 62 | 84 | 91 | 95 | 95 | 9 |
| 746276 | 49 | 70 | 81 | 87 | 88 | 12 |
| 746277 | 7 | 26 | 38 | 46 | 57 | 450 |
| 746278 | 22 | 36 | 46 | 50 | 64 | 200 |
| 746279 | 37 | 57 | 74 | 77 | 89 | 25 |
| 746280 | 47 | 61 | 74 | 84 | 88 | 15 |
| 746281 | 0 | 36 | 50 | 69 | 73 | 100 |
| 746282 | 20 | 35 | 50 | 70 | 70 | 100 |
| 746283 | 6 | 24 | 30 | 54 | 60 | 300 |
| 746284 | 21 | 47 | 60 | 72 | 78 | 45 |
| 746285 | 37 | 60 | 72 | 79 | 81 | 25 |
| 746286 | 48 | 72 | 84 | 90 | 92 | 12 |
| 746287 | 32 | 62 | 71 | 80 | 82 | 25 |

TABLE 40
Dose-dependent inhibition of human K-Ras mRNA expression
by free-uptake of ISIS oligonucleotides

| Isis | Inhibition (%) | | | | IC₅₀ |
|---|---|---|---|---|---|
| No. | 148 nM | 444 nM | 1333 nM | 4000 nM | (μM) |
| 141923 | 0 | 0 | 0 | 0 | NA |
| 651499 | 22 | 49 | 63 | 73 | 0.7 |
| 651530 | 44 | 63 | 78 | 89 | 0.2 |
| 651541 | 31 | 61 | 71 | 80 | 0.4 |
| 651555 | 30 | 59 | 75 | 85 | 0.4 |
| 651603 | 36 | 59 | 70 | 80 | 0.3 |
| 651634 | 22 | 54 | 69 | 80 | 0.5 |
| 651635 | 31 | 52 | 65 | 74 | 0.5 |
| 651704 | 26 | 35 | 43 | 56 | 2.3 |
| 651795 | 22 | 47 | 59 | 74 | 0.7 |
| 651837 | 3 | 15 | 27 | 38 | 5 |
| 651987 | 42 | 70 | 85 | 88 | 0.2 |
| 695785 | 35 | 63 | 75 | 79 | 0.3 |
| 695809 | 32 | 52 | 71 | 80 | 0.4 |
| 695823 | 19 | 41 | 63 | 73 | 0.8 |
| 695847 | 25 | 55 | 77 | 87 | 0.4 |
| 695852 | 20 | 33 | 49 | 65 | 1.4 |
| 695867 | 59 | 79 | 86 | 92 | 0.04 |
| 695883 | 17 | 18 | 43 | 57 | 2.7 |
| 695885 | 21 | 55 | 69 | 84 | 0.5 |
| 695912 | 45 | 69 | 72 | 82 | 0.1 |
| 695917 | 32 | 55 | 73 | 76 | 0.4 |
| 695924 | 44 | 65 | 73 | 83 | 0.2 |
| 695930 | 31 | 54 | 75 | 82 | 0.4 |
| 695998 | 37 | 54 | 74 | 80 | 0.3 |
| 696012 | 31 | 69 | 77 | 89 | 0.3 |
| 696013 | 33 | 64 | 73 | 83 | 0.3 |
| 696017 | 55 | 65 | 85 | 90 | 0.1 |
| 696018 | 37 | 58 | 73 | 80 | 0.3 |
| 696026 | 34 | 68 | 61 | 76 | 0.3 |
| 696043 | 28 | 43 | 69 | 81 | 0.6 |
| 696044 | 55 | 76 | 85 | 90 | 0.1 |
| 696090 | 43 | 64 | 78 | 83 | 0.2 |
| 696091 | 24 | 38 | 44 | 66 | 1.4 |
| 696096 | 23 | 62 | 74 | 82 | 0.4 |
| 696137 | 42 | 66 | 74 | 83 | 0.2 |
| 696152 | 27 | 61 | 73 | 81 | 0.4 |
| 696167 | 0 | 55 | 67 | 77 | 0.8 |
| 696176 | 0 | 0 | 11 | 21 | >4 |
| 696219 | 7 | 37 | 51 | 63 | 1.5 |
| 696241 | 14 | 18 | 15 | 32 | 5 |
| 696271 | 34 | 53 | 69 | 76 | 0.4 |
| 696276 | 26 | 39 | 52 | 63 | 1.2 |
| 696287 | 29 | 40 | 57 | 72 | 0.8 |
| 696289 | 2 | 13 | 7 | 7 | >4 |
| 696299 | 29 | 30 | 50 | 62 | 1.5 |
| 696317 | 15 | 49 | 66 | 75 | 0.7 |
| 696318 | 14 | 38 | 47 | 60 | 1.7 |
| 696355 | 16 | 38 | 53 | 65 | 1.2 |
| 696356 | 29 | 33 | 55 | 64 | 1.2 |
| 696358 | 28 | 40 | 60 | 69 | 0.8 |
| 696377 | 15 | 42 | 59 | 75 | 0.9 |
| 696495 | 18 | 48 | 52 | 71 | 0.9 |
| 696554 | 3 | 28 | 47 | 60 | 1.9 |
| 696556 | 25 | 46 | 62 | 73 | 0.7 |

TABLE 41
Dose-dependent inhibition of human K-Ras mRNA expression
by free-uptake of ISIS oligonucleotides

| Isis | Inhibition (%) | | | | IC₅₀ |
|---|---|---|---|---|---|
| No. | 185 nM | 556 nM | 1667 nM | 5000 nM | (μM) |
| 141923 | 0 | 0 | 0 | 0 | >10,000 |
| 651987 | 16 | 47 | 67 | 77 | 1.3 |
| 695867 | 29 | 59 | 65 | 78 | N/A |
| 695924 | 14 | 42 | 58 | 77 | 1.5 |
| 695998 | 26 | 42 | 47 | 72 | N/A |
| 696017 | 41 | 60 | 77 | 87 | NA |
| 696044 | 31 | 52 | 77 | 89 | 0.9 |
| 696096 | 17 | 36 | 59 | 75 | N/A |
| 696152 | 32 | 56 | 68 | 82 | N/A |
| 740164 | 16 | 46 | 62 | 78 | N/A |
| 740167 | 15 | 39 | 62 | 80 | 1.0 |
| 740179 | 1 | 35 | 56 | 71 | 1.5 |
| 740187 | 27 | 45 | 57 | 82 | N/A |
| 740188 | 31 | 48 | 67 | 8 | N/A |
| 740191 | 28 | 62 | 74 | 87 | N/A |
| 740194 | 44 | 71 | 83 | 92 | N/A |
| 740196 | 22 | 39 | 60 | 69 | 1.1 |
| 740199 | 22 | 47 | 68 | 76 | 0.8 |
| 740201 | 11 | 33 | 58 | 68 | 1.4 |
| 740211 | 0 | 17 | 48 | 58 | 2.7 |
| 740212 | 13 | 33 | 63 | 75 | 1.2 |
| 740216 | 50 | 46 | 69 | 82 | 0.3 |
| 740218 | 21 | 45 | 66 | 83 | 0.8 |
| 740221 | 22 | 54 | 77 | 83 | 0.6 |
| 740227 | 27 | 46 | 45 | 79 | 1 |
| 740229 | 0 | 2 | 40 | 58 | 3.5 |
| 740233 | 27 | 47 | 73 | 81 | 0.7 |
| 740238 | 33 | 55 | 69 | 78 | NA |
| 740246 | 31 | 53 | 79 | 82 | NA |
| 740250 | 30 | 55 | 80 | 85 | 0.5 |
| 740253 | 28 | 47 | 53 | 66 | NA |
| 740255 | 26 | 52 | 70 | 80 | NA |
| 740256 | 43 | 57 | 78 | 90 | NA |
| 740258 | 21 | 46 | 69 | 80 | 0.8 |
| 740261 | 19 | 63 | 79 | 88 | 0.5 |

TABLE 42
Dose-dependent inhibition of human K-Ras mRNA expression
by free-uptake of ISIS oligonucleotides

| Isis | Inhibition (%) | | | | | IC₅₀ |
|---|---|---|---|---|---|---|
| No. | 62 nM | 185 nM | 556 nM | 1667 nM | 5000 nM | (μM) |
| 141923 | 2 | 0 | 0 | 0 | 0 | >5 |
| 651588 | 12 | 0 | 21 | 47 | 69 | 2.2 |
| 651634 | 11 | 2 | 2 | 35 | 52 | >5 |
| 651653 | 3 | 2 | 37 | 47 | 71 | 1.4 |
| 651987 | 0 | 26 | 44 | 58 | 77 | 1.0 |
| 651634 | 11 | 2 | 2 | 35 | 52 | >5 |
| 651653 | 3 | 25 | 37 | 47 | 71 | 1.4 |
| 652028 | 3 | 3 | 19 | 43 | 60 | 3.2 |
| 716583 | 0 | 6 | 5 | 31 | 65 | 4.2 |
| 716587 | 0 | 9 | 17 | 43 | 64 | 2.3 |
| 716588 | 0 | 13 | 35 | 52 | 71 | 1.5 |
| 716600 | 0 | 14 | 35 | 53 | 72 | 1.4 |
| 716608 | 0 | 0 | 27 | 45 | 70 | 2 |
| 716612 | 16 | 3 | 34 | 39 | 69 | 2.2 |
| 716625 | 0 | 3 | 29 | 40 | 64 | 2.5 |
| 716628 | 0 | 0 | 36 | 58 | 74 | 1.3 |
| 716655 | 0 | 0 | 27 | 53 | 68 | 2 |
| 716656 | 0 | 9 | 21 | 46 | 67 | 2 |
| 716673 | 3 | 7 | 29 | 47 | 67 | 2 |
| 716674 | 1 | 0 | 35 | 61 | 78 | 1.2 |
| 716675 | 8 | 8 | 30 | 56 | 68 | 1.6 |
| 716683 | 19 | 0 | 23 | 43 | 60 | 2.7 |
| 716716 | 0 | 0 | 26 | 48 | 68 | 2 |
| 716728 | 1 | 28 | 24 | 46 | 71 | 1.7 |
| 716758 | 10 | 0 | 36 | 58 | 67 | 1.6 |
| 716763 | 0 | 10 | 24 | 45 | 66 | 2 |
| 716772 | 0 | 19 | 32 | 50 | 67 | 1.7 |
| 716782 | 0 | 0 | 19 | 31 | 39 | >5 |
| 716807 | 3 | 5 | 7 | 9 | 16 | >5 |

### Study 2

[0371] A431 cells were plated at a density of 10,000 cells per well. Cells were incubated with concentrations of antisense oligonucleotide specified in the tables below. Each table represents a separate experiment. After approximately 48 hours, RNA was isolated from the cells and K-Ras mRNA levels were measured by quantitative real-time PCR. Human K-Ras primer probe set RTS3496_MGB, described above, was used to measure mRNA levels. K-Ras mRNA levels were normalized to RIBOGREEN©. Results are presented as percent inhibition of K-Ras, relative to untreated control cells. A negative value for percent inhibition indicates that the K-Ras mRNA level was higher than in untreated cells.

[0372] For some antisense oligonucleotides, the half maximal inhibitory concentration (IC₅₀) is also presented. As illustrated in the tables below, oligonucleotides were successfully taken up by the cells and K-Ras mRNA levels were significantly reduced in a dose-dependent manner in antisense oligonucleotide treated cells.

TABLE 43
Dose-dependent inhibition of human K-Ras mRNA expression
by free-uptake of ISIS oligonucleotides

| Isis | Inhibition (%) | | | | |
|---|---|---|---|---|---|
| No. | 7.81 nM | 31.25 nM | 125.0 nM | 500.0 nM | 2000 nM |
| 141923 | 0 | 0 | 0 | 0 | 0 |
| 651987 | 30 | 39 | 68 | 87 | 93 |
| 696018 | 24 | 41 | 64 | 87 | 93 |
| 696044 | 29 | 54 | 83 | 94 | 97 |
| 716600 | 20 | 45 | 70 | 89 | 94 |
| 716655 | 2 | 20 | 49 | 79 | 92 |
| 740233 | 29 | 46 | 70 | 86 | 93 |
| 746275 | 25 | 47 | 65 | 85 | 91 |

TABLE 44
Dose-dependent inhibition of human K-Ras mRNA expression
by free-uptake of ISIS oligonucleotides

| | Inhibition (%) | | | | | |
|---|---|---|---|---|---|---|
| Isis | 7.81 | 31.25 | 125.0 | 500.0 | 2000 | IC₅₀ |
| No. | nM | nM | nM | nM | nM | (μM) |
| 141923 | 2 | 1 | 0 | 3 | 4 | >2 |
| 651987 | 18 | 30 | 67 | 87 | 93 | 0.06 |
| 696018 | 9 | 26 | 57 | 80 | 90 | 0.11 |
| 696044 | 15 | 44 | 83 | 92 | 95 | 0.04 |
| 716600 | 13 | 36 | 67 | 88 | 94 | 0.06 |
| 716655 | 10 | 23 | 53 | 82 | 92 | 0.11 |
| 740233 | 7 | 32 | 58 | 80 | 89 | 0.09 |
| 746275 | 6 | 24 | 61 | 84 | 92 | 0.09 |

### Study 3

[0373] Hep3B cells were plated at a density of 20,000 cells per well. Cells were transfected using electroporation with increasing concentrations of antisense oligonucleotide, as shown below. After a treatment period of approximately 24 hours, RNA was isolated from the cells and human K-Ras mRNA levels were measured by quantitative real-time PCR. Human K-Ras primer probe set RTS3496_MGB, described above, was used to measure mRNA levels. K-Ras mRNA levels were normalized to Ribogreen. Results are presented as percent inhibition of K-Ras, relative to untreated control cells.

[0374] The half maximal inhibitory concentration (IC₅₀) is also presented. As illustrated in the table below, K-Ras mRNA levels were significantly reduced in a dose-dependent manner in antisense oligonucleotide treated cells.

TABLE 45
Dose-dependent inhibition of human K-Ras mRNA expression
by electroporation of ISIS oligonucleotides

| | Inhibition (%) | | | | | |
|---|---|---|---|---|---|---|
| ISIS | 61.7 | 185.2 | 555.6 | 1666.7 | 5000.0 | IC₅₀ |
| No. | nM | nM | nM | nM | nM | (μM) |
| 540806 | 14 | 36 | 67 | 75 | 90 | 0.4 |
| 651530 | 25 | 39 | 66 | 82 | 92 | 0.3 |
| 651551 | 38 | 65 | 80 | 87 | 93 | 0.1 |
| 651586 | 28 | 51 | 73 | 86 | 91 | 0.2 |
| 651595 | 15 | 40 | 65 | 80 | 37 | 0.3 |
| 651634 | 14 | 36 | 57 | 74 | 90 | 0.4 |
| 651645 | 9 | 43 | 67 | 83 | 84 | 0.4 |
| 651646 | 44 | 65 | 79 | 90 | 93 | 0.1 |
| 651647 | 12 | 40 | 61 | 83 | 89 | 0.4 |
| 651672 | 2 | 15 | 47 | 69 | 83 | 0.8 |
| 651733 | 16 | 42 | 66 | 79 | 86 | 0.3 |
| 651741 | 14 | 34 | 57 | 82 | 88 | 0.4 |
| 651760 | 8 | 37 | 56 | 74 | 89 | 0.5 |
| 651923 | 6 | 27 | 54 | 84 | 95 | 0.5 |
| 651951 | 13 | 30 | 55 | 76 | 89 | 0.5 |
| 651953 | 19 | 40 | 64 | 83 | 89 | 0.3 |
| 651959 | 9 | 31 | 66 | 79 | 85 | 0.4 |
| 651972 | 25 | 33 | 58 | 82 | 86 | 0.4 |
| 651987 | 35 | 46 | 66 | 82 | 90 | 0.2 |
| 651990 | 18 | 36 | 64 | 84 | 91 | 0.3 |
| 652002 | 13 | 20 | 53 | 77 | 85 | 0.6 |
| 652004 | 18 | 48 | 67 | 85 | 91 | 0.3 |
| 652019 | 21 | 37 | 68 | 84 | 89 | 0.3 |
| 652028 | 17 | 41 | 58 | 77 | 89 | 0.4 |
| 652034 | 11 | 36 | 63 | 79 | 87 | 0.4 |
| 652050 | 21 | 34 | 63 | 79 | 87 | 0.4 |
| 652100 | 2 | 32 | 58 | 72 | 88 | 0.5 |
| 652101 | 16 | 25 | 52 | 72 | 86 | 0.6 |
| 652132 | 19 | 42 | 72 | 76 | 83 | 0.3 |
| 652157 | 0 | 22 | 54 | 77 | 88 | 0.6 |

### Example 11: Dose-Dependent Inhibition of Antisense Oligonucleotides Targeting K-Ras in Cynomolgus Monkey Primary Hepatocytes

[0375] At the time this study was undertaken, the cynomolgus monkey genomic sequence was not available in the National Center for Biotechnology Information (NCBI) database; therefore, cross-reactivity with the cynomolgus monkey gene sequence could not be confirmed. Instead, the sequences of the ISIS antisense oligonucleotides used in the cynomolgus monkeys were compared to a rhesus monkey genomic DNA sequence for complementarity. It is expected that ISIS oligonucleotides with complementarity to the rhesus monkey sequence are fully cross-reactive with the cynomolgus monkey sequence as well. The human antisense oligonucleotides tested had at most one mismatch with the rhesus genomic sequence (the complement of GENBANK Accession NC_007868.1 truncated from nucleotide 25479955 to 25525362, designated herein as SEQ ID NO: 2194). In the table below, the number of mismatches of the oligonucleotides with respect to the rhesus genomic sequence is indicated as “# MM.”

TABLE 46

| | | | | SEQ |
|---|---|---|---|---|
| | | | # | ID |
| Isis No. | Sequence | Chemistry | MM | NO. |
| 141923 | CCTTCCCTGAAGGTTCCTCC | 5-10-5 MOE | | 2192 |
| 651987 | GCTATTAGGAGTCTTT | kkk-10-kkk | 0 | 272 |
| 696018 | CTCTTGATTTGTCAGC | kkk-10-kkk | 0 | 678 |
| 696044 | GTGTTTATGCAATGTT | kkk-10-kkk | 1 | 715 |
| 716600 | CCATTTATGTGACTAG | kkk-10-kkk | 1 | 790 |
| 716655 | TGTTTATGCAATGTTA | kkk-10-kkk | 1 | 854 |
| 740233 | GTGTTTATGCAATGTT | kkk-8-kdkdk | 1 | 2158 |
| 746275 | TCTTGATTTGTCAGCA | kk-10-keke | 0 | 804 |

[0376] Antisense oligonucleotides described above were tested at various doses in cynomolgus monkey hepatocytes for ability to reduce K-Ras expression. Cryopreserved cynomolgus monkey primary hepatocytes were plated at a density of 35,000 cells per well and transfected using electroporation with various concentrations of antisense oligonucleotide, as specified in the Tables below. After a treatment period of approximately 24 hours, the cells were washed and lysed, and RNA was isolated. Monkey K-Ras mRNA levels were measured by quantitative real-time PCR, using primer probe set RTS3496_MGB, as described above. K-Ras mRNA target levels were adjusted according to total RNA content, as measured by RIBOGREEN®. In the tables below, results are presented as percent inhibition of K-Ras, relative to untreated control cells. As used herein, a value of ‘0’ indicates that treatment with the antisense oligonucleotide did not inhibit mRNA levels.

TABLE 47
Dose dependent inhibition of monkey K-Ras mRNA expression
by electroporation of ISIS oligonucleotides into
in primary cynomolgus monkey hepatocytes

| | Inhibition (%) | | | | | |
|---|---|---|---|---|---|---|
| ISIS | 19.5 | 78.1 | 312.5 | 1250 | 5000 | IC₅₀ |
| No. | nM | nM | nM | nM | nM | (μM) |
| 141923 | 0 | 4 | 0 | 0 | 0 | >5 |
| 651530 | 37 | 64 | 80 | 83 | 84 | 0.03 |
| 651555 | 26 | 63 | 68 | 90 | 94 | 0.07 |
| 651587 | 48 | 69 | 75 | 85 | 78 | 0.01 |
| 651987 | 50 | 75 | 81 | 88 | 87 | 0.01 |
| 695785 | 14 | 40 | 72 | 81 | 83 | 0.2 |
| 695980 | 0 | 0 | 17 | 28 | 50 | 6 |
| 695995 | 33 | 46 | 70 | 74 | 90 | 0.1 |

TABLE 48
Dose dependent inhibition of monkey K-Ras mRNA expression
by electroporation of ISIS oligonucleotides into
in primary cynomolgus monkey hepatocytes

| | Inhibition (%) | | | | | |
|---|---|---|---|---|---|---|
| Isis | 7.81 | 31.25 | 125.0 | 500.0 | 2000 | IC₅₀ |
| No. | nM | nM | nM | nM | nM | (μM) |
| 141923 | 2 | 0 | 2 | 0 | 0 | >2 |
| 651987 | 0 | 20 | 64 | 83 | 91 | 0.09 |
| 696018 | 11 | 26 | 57 | 83 | 91 | 0.10 |
| 696044 | 0 | 1 | 0 | 0 | 0 | >2 |
| 716600 | 2 | 19 | 52 | 79 | 91 | 0.14 |
| 716655 | 0 | 0 | 0 | 0 | 4 | >2 |
| 740233 | 4 | 0 | 0 | 0 | 0 | >2 |
| 746275 | 8 | 22 | 51 | 78 | 88 | 0.13 |

### Example 12: Tolerability of Antisense Oligonucleotides Targeting Human K-Ras mRNA in Lean BALB/c Mice

### Treatment

[0377] Six-to-seven week old male BALB/c mice (Jackson Laboratory, Bar Harbor, Me.) were injected subcutaneously two times a week for four weeks (for a total of 8 treatments) at 100 mg/kg/week with the antisense oligonucleotides or with saline. Each treatment group consisted of 4 animals. The mice were sacrificed 72 hours following the final administration.

### Plasma Chemistry Markers

[0378] To evaluate the effect of antisense oligonucleotides on liver and kidney function, plasma levels of ALT transaminase, albumin, blood urea nitrogen (BUN) and total bilirubin were measured using an automated clinical chemistry analyzer (Hitachi Olympus AU400e, Melville, N.Y.). The results are presented in the Table below. Antisense oligonucleotides causing changes in the levels of any of the liver or kidney function markers outside the expected range for antisense oligonucleotides were excluded from further studies.

TABLE 49
Plasma chemistry markers in male BALB/c mice

| ISIS | ALT | Albumin | BUN | T. Bilirubin |
|---|---|---|---|---|
| No. | (U/L) | (g/dL) | (mg/dL) | (mg/dL) |
| PBS | 65 | 2.8 | 25 | 0.17 |
| 549148 | 57 | 2.8 | 26 | 0.27 |
| 651530 | 143 | 2.7 | 26 | 0.22 |
| 651551 | 5927 | 3.3 | 26 | 4.62 |
| 651634 | 56 | 2.7 | 29 | 0.21 |
| 651645 | 4944 | 3.1 | 27 | 0.25 |
| 651646 | 1449 | 1.8 | 25 | 0.27 |
| 651647 | 2061 | 2.7 | 23 | 0.25 |
| 651672 | 4070 | 2.9 | 31 | 0.48 |
| 651923 | 4157 | 3.1 | 21 | 0.36 |
| 651972 | 2105 | 3.3 | 29 | 0.22 |
| 651987 | 71 | 2.7 | 29 | 0.16 |
| 651990 | 32 | 2.5 | 30 | 0.18 |
| 652002 | 106 | 3.2 | 29 | 0.20 |
| 652004 | 145 | 3.0 | 31 | 0.19 |
| 652019 | 5205 | 3.6 | 24 | 0.41 |
| 652028 | 3712 | 3.8 | 17 | 4.43 |
| 652034 | 1167 | 3.6 | 27 | 0.32 |
| 652101 | 48 | 3.1 | 23 | 0.22 |
| 652132 | 1399 | 3.3 | 28 | 0.22 |
| 652157 | 68 | 2.9 | 24 | 0.23 |

### Body and Organ Weights

[0379] Body weights of BALB/c mice were measured at days 1 and 27, and the average body weight for each group is presented in the Table below. Liver, spleen and kidney weights were measured at the end of the study, and are presented in the Table below. Antisense oligonucleotides that caused any changes in organ weights outside the expected range for antisense oligonucleotides were excluded from further studies.

TABLE 50
Body and organ weights (in grams)

| | | | | |
|---|---|---|---|---|
| ISIS | body (g) | kidney | liver | spleen |

| No. | Day 1 | Day 27 | (g) | (g) | (g) |
|---|---|---|---|---|---|
| PBS | 24 | 25 | 0.4 | 1.7 | 0.09 |
| 549148 | 24 | 27 | 0.5 | 1.5 | 0.10 |
| 651530 | 23 | 27 | 0.5 | 1.7 | 0.13 |
| 651551 | 24 | 23 | 0.4 | 1.7 | 0.09 |
| 651634 | 24 | 27 | 0.3 | 1.7 | 0.12 |
| 651645 | 24 | 27 | 0.4 | 1.4 | 0.14 |
| 651646 | 24 | 21 | 0.4 | 1.4 | 0.18 |
| 651647 | 24 | 25 | 0.4 | 1.5 | 0.18 |
| 651672 | 23 | 20 | 0.4 | 1.4 | 0.07 |
| 651733 | 24 | N/A | N/A | N/A | N/A |
| 651760 | 23 | N/A | N/A | N/A | N/A |
| 651923 | 23 | 25 | 0.3 | 1.9 | 0.15 |
| 651972 | 24 | 25 | 0.4 | 1.5 | 0.11 |
| 651987 | 24 | 27 | 0.4 | 1.9 | 0.11 |
| 651990 | 24 | 28 | 0.4 | 2.2 | 0.12 |
| 652002 | 24 | 29 | 0.4 | 1.8 | 0.13 |
| 652004 | 23 | 27 | 0.4 | 1.5 | 0.10 |
| 652019 | 24 | 24 | 0.4 | 1.8 | 0.14 |
| 652028 | 23 | 18 | 0.3 | 1.0 | 0.05 |
| 652034 | 23 | 25 | 0.4 | 1.4 | 0.11 |
| 652100 | 25 | N/A | N/A | N/A | N/A |
| 652101 | 23 | 28 | 0.5 | 1.4 | 0.10 |
| 652132 | 25 | 27 | 0.4 | 1.8 | 0.09 |
| 652157 | 23 | 28 | 0.5 | 1.7 | 0.13 |

### Example 13: Pharmacodynamics and Toxicological Profile of Antisense Oligonucleotides Targeting K-Ras in an A431 Epidermoid Carcinoma Xenograft Model

[0380] Female, 6-8 week old NCr nude mice (Taconic Biosciences, Hudson, N.Y.) were inoculated with human epidermoid carcinoma A431 cells and treated with an antisense oligonucleotide described in the tables above or with PBS. Effects of the oligonucleotides on K-Ras mRNA expression in the tumor and tolerability in the mice were evaluated.

### Treatment

[0381] The mice each were inoculated with 5×10⁶ A431 cells in 50% Matrigel (BD Bioscience) for tumor development. Antisense oligonucleotide treatment started at day 10-14 after tumor inoculation when the mean tumor size reached approximately 200 mm³. The mice were subcutaneously injected with 50 mg/kg three times per week (150 mg/kg/week) for three weeks, for a total of nine doses, with an antisense oligonucleotide or PBS. The body weights of the mice were measured once per week. Three weeks after the start of treatment, the mice were sacrificed, K-Ras mRNA levels in the tumor, spleen weights, and body weights were measured.

### Study 1

### RNA Analysis

[0382] RNA was extracted from tumor tissue for real-time PCR analysis and measurement of human K-Ras mRNA levels using primer probe set RTS3496_MGB, described herein above. Results are presented as average percent inhibition of K-Ras for each treatment group, relative to PBS control, normalized to glyceraldehyde-3-phosphate dehydrogenase or beta-actin mRNA levels. As shown in the Tables below, treatment with Isis antisense oligonucleotides resulted in reduction of human K-Ras mRNA in comparison to the PBS control.

TABLE 51
Antisense mediated inhibition of human K-Ras
mRNA expression in A431 xenograft model

| ISIS | Inhibition |
|---|---|
| No. | (%) |
| 651499 | 39 |
| 651530 | 55 |
| 651541 | 32 |
| 651555 | 51 |
| 651587 | 51 |
| 651603 | 41 |
| 651634 | 37 |
| 651795 | 46 |
| 651987 | 50 |
| 651990 | 46 |
| 652004 | 47 |
| 695815 | 24 |
| 695823 | 54 |
| 695847 | 50 |
| 695867 | 68 |
| 695912 | 34 |
| 695930 | 45 |
| 695976 | 42 |
| 695980 | 56 |
| 695981 | 35 |
| 695995 | 47 |
| 696026 | 35 |
| 696317 | 40 |
| 696816 | 31 |

### Body Weight Measurements

[0383] Body weights were measured throughout the treatment period. The data is presented in the Table below as the average for each treatment group at various time points. Spleen weights were measured at the end of the study and are presented in the Table below.

TABLE 52
Body and spleen weight measurements in A431 xenograft model

| Isis | Body weight (g) | | | | Spleen (g) |
|---|---|---|---|---|---|
| No. | Day 1 | Day 6 | Day 12 | Day 19 | Day 20 |
| PBS | 21.5 | 23.0 | 23.4 | 22.9 | 0.09 |
| 481464 | 21.4 | 22.4 | 22.0 | 22.4 | 0.11 |
| 549148 | 21.8 | 23.0 | 22.1 | 23.0 | 0.10 |
| 560131 | 19.9 | 20.4 | 20.2 | 19.9 | 0.10 |
| 651499 | 20.8 | 21.9 | 22.2 | 22.5 | 0.13 |
| 651530 | 21.1 | 22.5 | 23.1 | 22.1 | 0.10 |
| 651541 | 20.5 | 21.4 | 21.4 | 21.0 | 0.09 |
| 651555 | 21.5 | 22.2 | 22.4 | 22.1 | 0.09 |
| 651587 | 21.5 | 22.6 | 22.6 | 20.8 | 0.11 |
| 651603 | 22.7 | 24.7 | 24.8 | 22.0 | 0.36 |
| 651634 | 20.6 | 21.9 | 21.9 | 21.9 | 0.09 |
| 651635 | 20.3 | 21.7 | 17.9 | N/A | N/A |
| 651795 | 21.4 | 22.8 | 23.3 | 22.8 | 0.09 |
| 651987 | 22.8 | 24.2 | 24.1 | 24.1 | 0.09 |
| 651990 | 22.3 | 23.3 | 23.3 | 23.0 | 0.12 |
| 652004 | 21.0 | 22.3 | 23.3 | 22.8 | 0.16 |
| 695815 | 22.7 | 23.4 | 23.4 | 21.4 | 0.09 |
| 695823 | 21.4 | 22.6 | 22.5 | 21.9 | 0.09 |
| 695847 | 21.5 | 22.1 | 22.1 | 20.4 | 0.09 |
| 695867 | 21.1 | 22.6 | 22.2 | 19.6 | 0.06 |
| 695912 | 21.4 | 22.3 | 22.4 | 22.5 | 0.09 |
| 695930 | 21.7 | 22.2 | 22.8 | 22.5 | 0.09 |
| 695976 | 20.5 | 22.1 | 22.1 | 21.6 | 0.11 |
| 695980 | 21.1 | 22.5 | 22.1 | 21.2 | 0.07 |
| 695981 | 19.9 | 21.6 | 22.1 | 21.7 | 0.08 |
| 695995 | 20.7 | 21.8 | 22.0 | 21.6 | 0.10 |
| 696026 | 21.7 | 22.8 | 23.4 | 22.8 | 0.09 |
| 696317 | 21.5 | 23.1 | 23.0 | 22.9 | 0.13 |
| 696816 | 21.6 | 22.3 | 22.3 | 22.1 | 0.12 |

### Plasma Chemistry Markers

[0384] To evaluate the effect of antisense oligonucleotides on liver and kidney function, plasma levels of transaminases, total bilirubin and blood urea nitrogen (BUN) were measured using an automated clinical chemistry analyzer (Hitachi Olympus AU400e, Melville, N.Y.). The results are presented in the Table below.

TABLE 53
Plasma chemistry markers in A431 xenograft model

| ISIS | ALT | AST | Albumin | T. Bilirubin | BUN |
|---|---|---|---|---|---|
| No. | (U/L) | (U/L) | g/dL | (mg/dL) | (mg/dL) |
| PBS | 37.0 | 117.5 | 3.1 | 0.17 | 22 |
| 481464 | 74.0 | 158.8 | 2.8 | 0.13 | 21 |
| 549148 | 48.3 | 107.7 | 3.2 | 0.16 | 20 |
| 560131 | 88.3 | 198.0 | 3.0 | 0.13 | 31 |
| 651499 | 69.8 | 142.0 | 2.8 | 0.17 | 22 |
| 651530 | 163.0 | 261.8 | 3.2 | 0.15 | 20 |
| 651541 | 37.3 | 67.3 | 2.7 | 0.14 | 22 |
| 651555 | 53.3 | 111.5 | 3.2 | 0.17 | 24 |
| 651587 | 151.8 | 239.3 | 3.3 | 0.13 | 16 |
| 651603 | 585.3 | 766.0 | 2.5 | 0.18 | 29 |
| 651634 | 54.3 | 134.8 | 3.1 | 0.15 | 20 |
| 651795 | 76.0 | 139.8 | 3.0 | 0.13 | 24 |
| 651987 | 51.3 | 115.5 | 3.0 | 0.13 | 18 |
| 651990 | 33.8 | 76.5 | 2.5 | 0.13 | 20 |
| 652004 | 96.3 | 154.0 | 3.0 | 0.12 | 21 |
| 695815 | 40.3 | 95.8 | 2.9 | 0.13 | 22 |
| 695823 | 27.7 | 116.7 | 2.9 | 0.15 | 22 |
| 695847 | 326.3 | 396.0 | 2.9 | 0.16 | 20 |
| 695867 | 722.8 | 1200.5 | 3.1 | 0.94 | 19 |
| 695912 | 28.8 | 80.5 | 3.1 | 0.16 | 23 |
| 695930 | 50.5 | 131.8 | 3.0 | 0.20 | 22 |
| 695976 | 101.8 | 281.0 | 2.7 | 0.17 | 20 |
| 695980 | 42.5 | 104.0 | 3.1 | 0.19 | 25 |
| 695981 | 53.8 | 132.3 | 2.8 | 0.12 | 21 |
| 695995 | 37.8 | 122.5 | 2.9 | 0.13 | 22 |
| 696026 | 56.5 | 101.5 | 3.1 | 0.19 | 23 |
| 696317 | 46.8 | 133.5 | 2.7 | 0.10 | 23 |
| 696816 | 44.0 | 83.3 | 2.7 | 0.13 | 24 |

### Study 2

### RNA Analysis

[0385] RNA was extracted from tumor tissue for real-time PCR analysis and measurement of human K-Ras mRNA levels using primer probe set RTS3496_MGB, described herein above. Results are presented as average percent inhibition of K-Ras for each treatment group, relative to PBS control. As shown in the Table below, treatment with Isis antisense oligonucleotides resulted in reduction of human K-Ras mRNA in comparison to the PBS control.

TABLE 54
Antisense mediated inhibition of human K-Ras
mRNA expression in A431 xenograft model

| ISIS | Inhibition |
|---|---|
| No. | (%) |
| 481464 | 33 |
| 549148 | 28 |
| 651987 | 64 |
| 695785 | 54 |
| 695809 | 28 |
| 695917 | 45 |
| 695924 | 87 |
| 695977 | 36 |
| 695998 | 55 |
| 696012 | 24 |
| 696013 | 54 |
| 696017 | 70 |
| 696018 | 71 |
| 696043 | 41 |
| 696044 | 72 |
| 696091 | 79 |
| 696096 | 75 |
| 696108 | 53 |
| 696117 | 40 |
| 696137 | 45 |
| 696152 | 58 |
| 696167 | 53 |
| 696271 | 50 |
| 696287 | 47 |
| 696358 | 46 |
| 696377 | 37 |
| 696556 | 41 |

### Body Weight Measurements

[0386] Body weights were measured throughout the treatment period. The data is presented in the Table below as the average for each treatment group at various time points. Spleen weights were measured at the end of the study (Day 21) and are presented in the Table below.

TABLE 55
Body and spleen weight measurements in A431 xenograft model

| | | |
|---|---|---|
| Isis | Body weight (g) | Spleen (g) |

| No. | Day 8 | Day 19 | Day 21 |
|---|---|---|---|
| PBS | 23.2 | 23.5 | 0.09 |
| 481464 | 20.9 | 21.2 | 0.09 |
| 549148 | 22.8 | 22.0 | 0.10 |
| 651987 | 20.8 | 20.5 | 0.09 |
| 695785 | 21.7 | 21.5 | 0.09 |
| 695809 | 22.0 | 21.5 | 0.08 |
| 695917 | 21.7 | 21.6 | 0.10 |
| 695924 | 22.4 | 18.8 | 0.05 |
| 695977 | 22.3 | 22.9 | 0.10 |
| 695998 | 22.9 | 23.2 | 0.10 |
| 696012 | 23.0 | 22.5 | 0.11 |
| 696013 | 21.6 | 22.7 | 0.14 |
| 696017 | 24.4 | 23.1 | 0.10 |
| 696018 | 23.0 | 23.1 | 0.09 |
| 696043 | 22.5 | 22.2 | 0.13 |
| 696044 | 21.6 | 20.5 | 0.09 |
| 696090 | 22.4 | N/A | N/A |
| 696091 | 22.1 | 20.8 | 0.08 |
| 696096 | 21.7 | 19.8 | 0.07 |
| 696108 | 22.5 | 22.8 | 0.11 |
| 696117 | 22.6 | 22.6 | 0.10 |
| 696137 | 23.0 | 21.9 | 0.10 |
| 696152 | 22.2 | 22.3 | 0.12 |
| 696167 | 22.7 | 22.5 | 0.12 |
| 696271 | 21.4 | 21.5 | 0.09 |
| 696287 | 24.0 | 24.4 | 0.15 |
| 696358 | 22.2 | 21.2 | 0.08 |
| 696377 | 23.2 | 23.6 | 0.10 |
| 696556 | 23.3 | 22.9 | 0.10 |

### Plasma Chemistry Markers

[0387] To evaluate the effect of antisense oligonucleotides on liver and kidney function, plasma levels of transaminases, total bilirubin and blood urea nitrogen (BUN) were measured using an automated clinical chemistry analyzer (Hitachi Olympus AU400e, Melville, N.Y.). The results are presented in the Table below.

TABLE 56
Plasma chemistry markers in A431 xenograft model

| ISIS | ALT | AST | Albumin | T. Bilirubin | BUN |
|---|---|---|---|---|---|
| No. | (U/L) | (U/L) | g/dL | (mg/dL) | (mg/dL) |
| PBS | 35.5 | 73.6 | 3.0 | 0.13 | 20 |
| 481464 | 42.3 | 91.0 | 2.9 | 0.10 | 21 |
| 549148 | 33.3 | 81.3 | 2.9 | 0.13 | 14 |
| 651987 | 43.5 | 101.0 | 2.8 | 0.12 | 25 |
| 695785 | 56.5 | 146.5 | 2.8 | 0.17 | 25 |
| 695809 | 264.8 | 312.0 | 2.7 | 0.18 | 17 |
| 695917 | 270.0 | 389.3 | 2.8 | 0.16 | 19 |
| 695924 | 540.0 | 5421.0 | 3.4 | 2.20 | 48 |
| 695977 | 32.0 | 70.0 | 2.9 | 0.15 | 22 |
| 695998 | 3197.3 | 3515.8 | 3.0 | 2.96 | 17 |
| 696012 | 41.0 | 135.3 | 2.8 | 0.15 | 21 |
| 696013 | 687.0 | 1511.0 | 2.4 | 0.17 | 20 |
| 696017 | 4189.3 | 3429.0 | 2.6 | 0.84 | 18 |
| 696018 | 126.8 | 197.8 | 3.2 | 0.18 | 19 |
| 696043 | 57.0 | 146.0 | 2.8 | 0.15 | 21 |
| 696044 | 734.5 | 871.3 | 3.0 | 0.24 | 16 |
| 696091 | 2168.0 | 6776.0 | 2.5 | 7.61 | 35 |
| 696096 | 4400.3 | 2436.0 | 2.1 | 2.35 | 18 |
| 696108 | 45.8 | 105.0 | 3.0 | 0.13 | 19 |
| 696117 | 1699.3 | 1426.3 | 3.2 | 0.22 | 18 |
| 696137 | 5308.3 | 6041.3 | 2.9 | 0.52 | 24 |
| 696152 | 1818.3 | 1798.0 | 2.9 | 0.30 | 22 |
| 696167 | 271.0 | 312.5 | 3.0 | 0.17 | 17 |
| 696271 | 41.3 | 84.8 | 2.9 | 0.16 | 20 |
| 696287 | 92.0 | 183.3 | 2.8 | 0.13 | 17 |
| 696358 | 2284.3 | 1820.0 | 3.0 | 0.27 | 18 |
| 696377 | 34.8 | 106.5 | 3.0 | 0.12 | 18 |
| 696556 | 36.0 | 87.0 | 3.0 | 0.15 | 17 |

### Study 3

### RNA Analysis

[0388] RNA was extracted from tumor tissue for real-time PCR analysis and measurement of human K-Ras mRNA levels using primer probe set RTS3496_MGB, described herein above. Results are presented as average percent inhibition of K-Ras for each treatment group, relative to PBS control. As shown in the Table below, treatment with Isis antisense oligonucleotides resulted in reduction of human K-Ras mRNA in comparison to the PBS control.

TABLE 57
Antisense mediated inhibition of human K-Ras
mRNA expression in A431 xenograft model

| ISIS | Inhibition |
|---|---|
| No. | (%) |
| 651588 | 69 |
| 651653 | 41 |
| 651987 | 51 |
| 716587 | 40 |
| 716588 | 37 |
| 716600 | 55 |
| 716608 | 43 |
| 716612 | 39 |
| 716628 | 48 |
| 716655 | 49 |
| 716656 | 64 |
| 716673 | 54 |
| 716683 | 50 |
| 716716 | 51 |
| 716758 | 74 |
| 716769 | 52 |
| 716772 | 47 |

### Body Weight Measurements

[0389] Body weights were measured throughout the treatment period. The data is presented in the Table below as the average for each treatment group at various time points. Organ weights were measured at the end of the study (Day 23) and are presented in the Table below.

TABLE 58
Body and organ weight measurements in A431 xenograft model

| Isis | Body weight (g) | | | | Organ weights (g) | | |
|---|---|---|---|---|---|---|---|
| No. | Day −1 | Day 7 | Day 14 | Day 21 | kidney | liver | spleen |
| PBS | 20.5 | 21.0 | 21.5 | 21.9 | 0.30 | 1.06 | 0.09 |
| 651588 | 19.9 | 20.9 | 20.3 | 18.0 | 0.29 | 1.41 | 0.07 |
| 651653 | 20.1 | 21.1 | 20.5 | 20.4 | 0.32 | 1.63 | 0.13 |
| 651987 | 21.2 | 21.6 | 21.7 | 22.2 | 0.33 | 1.42 | 0.12 |
| 716587 | 21.7 | 23.2 | 21.4 | 22.4 | 0.36 | 2.38 | 0.15 |
| 716588 | 20.4 | 21.7 | 21.7 | 22.1 | 0.33 | 1.74 | 0.09 |
| 716600 | 20.3 | 21.3 | 22.0 | 22.7 | 0.34 | N/A | 0.13 |
| 716608 | 21.0 | 19.9 | 17.3 | 20.9 | 0.39 | 2.07 | 0.11 |
| 716612 | 21.7 | 22.1 | 22.4 | 23.5 | 0.34 | 2.78 | 0.14 |
| 716625 | 20.1 | 20.3 | 17.2 | N/A | N/A | N/A | N/A |
| 716628 | 21.0 | 21.7 | 20.8 | 20.1 | 0.36 | 1.55 | 0.12 |
| 716655 | 19.6 | 20.6 | 20.9 | 21.5 | 0.33 | 1.47 | 0.13 |
| 716656 | 20.5 | 20.9 | 19.9 | 18.5 | 0.29 | 1.69 | 0.07 |
| 716673 | 19.2 | 20.5 | 19.0 | 18.9 | 0.32 | 2.47 | 0.08 |
| 716674 | 20.3 | 21.0 | N/A | N/A | N/A | N/A | N/A |
| 716675 | 21.4 | 20.0 | N/A | N/A | N/A | N/A | N/A |
| 716683 | 21.2 | 21.0 | 19.2 | 19.9 | 0.35 | 2.58 | 0.09 |
| 716716 | 19.7 | 20.5 | 20.8 | 21.4 | 0.34 | 1.43 | 0.11 |
| 716728 | 21.7 | 18.4 | N/A | N/A | N/A | N/A | N/A |
| 716758 | 20.6 | 20.3 | 17.6 | 16.2 | 0.30 | 1.29 | 0.05 |
| 716763 | 21.8 | N/A | N/A | N/A | N/A | N/A | N/A |
| 716769 | 19.6 | 20.6 | 20.8 | 20.7 | 0.38 | 1.54 | 0.12 |
| 716772 | 19.9 | 20.9 | 21.3 | 22.1 | 0.29 | 1.16 | 0.10 |

### Plasma Chemistry Markers

[0390] To evaluate the effect of antisense oligonucleotides on liver and kidney function, plasma levels of transaminases, total bilirubin and blood urea nitrogen (BUN) were measured using an automated clinical chemistry analyzer (Hitachi Olympus AU400e, Melville, N.Y.). The results are presented in the Table below.

TABLE 59
Plasma chemistry markers in A431 xenograft model

| ISIS | ALT | AST | T. Bilirubin | BUN |
|---|---|---|---|---|
| No. | (U/L) | (U/L) | (mg/dL) | (mg/dL) |
| PBS | 31.4 | 109.8 | 0.17 | 20 |
| 651588 | 4064.3 | 3039.5 | 0.21 | 23 |
| 651653 | 1900.5 | 1571.3 | 0.20 | 21 |
| 651987 | 88.5 | 150.8 | 0.11 | 20 |
| 716587 | 640.0 | 401.5 | 0.22 | 18 |
| 716588 | 1418.8 | 1067.8 | 0.17 | 20 |
| 716600 | 217.3 | 316.0 | 0.11 | 19 |
| 716608 | 950.0 | 1622.0 | 0.26 | 22 |
| 716612 | 281.0 | 267.5 | 0.10 | 19 |
| 716628 | 2662.7 | 3046.0 | 0.18 | 18 |
| 716655 | 125.0 | 208.8 | 0.11 | 23 |
| 716656 | 3306.3 | 2432.3 | 2.43 | 24 |
| 716673 | 3574.3 | 2518.5 | 1.01 | 24 |
| 716683 | 2644.5 | 3775.0 | 0.22 | 28 |

### Study 4

### RNA Analysis

[0391] RNA was extracted from tumor tissue for real-time PCR analysis and measurement of human K-Ras mRNA levels using primer probe set RTS3496_MGB, described herein above. Results are presented as average percent inhibition of K-Ras for each treatment group, relative to PBS control. As shown in the Tables below, treatment with Isis antisense oligonucleotides resulted in reduction of human K-Ras mRNA in comparison to the PBS control.

TABLE 60
Antisense mediated inhibition of human K-Ras
mRNA expression in A431 xenograft model

| ISIS | Inhibition |
|---|---|
| No. | (%) |
| 481464 | 0 |
| 651987 | 45 |
| 696816 | 14 |
| 740167 | 40 |
| 740171 | 31 |
| 740173 | 50 |
| 740179 | 50 |
| 740187 | 39 |
| 740188 | 62 |
| 740191 | 53 |
| 740194 | 56 |
| 740196 | 62 |
| 740199 | 57 |
| 740201 | 51 |
| 740212 | 41 |
| 740216 | 42 |
| 740218 | 48 |
| 740221 | 59 |
| 740223 | 57 |
| 740227 | 42 |
| 740233 | 54 |
| 740238 | 38 |
| 740244 | 22 |
| 740246 | 47 |
| 740250 | 50 |
| 740255 | 47 |
| 740256 | 67 |
| 740261 | 0 |
| 740294 | 30 |

### Body Weight Measurements

[0392] Body weights were measured throughout the treatment period. The data is presented in the Table below as the average for each treatment group at various time points. Organ weights were measured at the end of the study and are presented in the Table below.

TABLE 61
Body weight measurements in A431 xenograft model

| Isis | Body weight (g) | | | | | Organ weights (g) | | |
|---|---|---|---|---|---|---|---|---|
| No. | Day 3 | Day 8 | Day 15 | Day 22 | Day 24 | kidney | liver | spleen |
| PBS | 22.4 | 23.0 | 23.3 | 23.6 | 23.3 | 0.33 | 1.27 | 0.08 |
| 481464 | 19.9 | 20.5 | 20.8 | 21.9 | 22.1 | 0.30 | 1.32 | 0.11 |
| 651987 | 22.8 | 23.4 | 22.9 | 23.7 | 24.1 | 0.35 | 1.59 | 0.13 |
| 696816 | 21.1 | 21.7 | 21.6 | 22.7 | 23.0 | 0.33 | 1.33 | 0.11 |
| 740167 | 20.3 | 20.7 | 20.4 | 20.9 | 20.5 | 0.30 | 1.26 | 0.09 |
| 740171 | 22.1 | 22.4 | 23.1 | 24.2 | 24.5 | 0.36 | 1.51 | 0.37 |
| 740173 | 21.0 | 21.6 | 21.5 | 21.0 | 20.9 | 0.31 | 2.38 | 0.14 |
| 740179 | 21.4 | 20.9 | 22.2 | 22.8 | 22.7 | 0.36 | 1.41 | 0.12 |
| 740187 | 23.0 | 23.2 | 23.4 | 24.2 | 24.4 | 0.34 | 1.53 | 0.11 |
| 740188 | 22.6 | 21.7 | 19.6 | 19.4 | 19.7 | 0.35 | 3.23 | 0.03 |
| 740191 | 23.9 | 24.7 | 25.2 | 24.6 | 24.7 | 0.37 | 1.51 | 0.13 |
| 740194 | 23.5 | 24.3 | 23.4 | 21.7 | 21.8 | 0.40 | 1.61 | 0.16 |
| 740196 | 21.2 | 21.7 | 18.0 | 21.9 | 23.8 | 0.37 | 2.66 | 0.09 |
| 740199 | 21.5 | 22.3 | 21.8 | 21.5 | 21.8 | 0.39 | 2.40 | 0.12 |
| 740201 | 22.7 | 22.9 | 23.1 | 23.7 | 23.5 | 0.36 | 1.70 | 0.13 |
| 740212 | 21.9 | 22.4 | 22.2 | 22.5 | 22.3 | 0.33 | 1.44 | 0.14 |
| 740216 | 22.1 | 22.7 | 22.4 | 22.3 | 22.5 | 0.41 | 1.89 | 0.16 |
| 740218 | 20.8 | 21.4 | 21.3 | 21.0 | 21.7 | 0.33 | 2.72 | 0.13 |
| 740221 | 23.0 | 23.9 | 22.1 | 22.7 | 23.4 | 0.41 | 3.43 | 0.09 |
| 740223 | 20.6 | 21.1 | 21.1 | 21.2 | 21.2 | 0.36 | 1.28 | 0.09 |
| 740227 | 20.3 | 21.2 | 21.0 | 21.6 | 21.4 | 0.34 | 2.24 | 0.14 |
| 740233 | 21.8 | 22.4 | 22.5 | 22.8 | 22.9 | 0.36 | 1.37 | 0.10 |
| 740238 | 23.8 | 24.5 | 24.5 | 25.0 | 25.1 | 0.38 | 1.61 | 0.13 |
| 740244 | 21.3 | 22.8 | 22.7 | 22.9 | 23.2 | 0.38 | 1.65 | 0.12 |
| 740246 | 20.9 | 21.5 | 21.5 | 21.9 | 21.7 | 0.37 | 3.48 | 0.13 |
| 740250 | 23.1 | 23.2 | 19.8 | 20.5 | 21.5 | 0.39 | 2.69 | 0.10 |
| 740255 | 21.9 | 22.6 | 22.4 | 22.7 | 22.7 | 0.33 | 2.18 | 0.09 |
| 740256 | 21.1 | 21.3 | 19.5 | 21.2 | 21.5 | 0.37 | 2.81 | 0.09 |
| 740258 | 21.8 | 21.2 | 17.3 | N/A | N/A | N/A | N/A | N/A |
| 740261 | 21.3 | 21.9 | 21.0 | 22.3 | 22.8 | 0.33 | 1.42 | 0.12 |
| 740294 | 20.8 | 21.5 | 21.9 | 22.0 | 21.8 | 0.36 | 1.75 | 0.11 |
| 740302 | 22.8 | 22.9 | N/A | N/A | N/A | N/A | N/A | N/A |

### Plasma Chemistry Markers

[0393] To evaluate the effect of antisense oligonucleotides on liver and kidney function, plasma levels of transaminases, total bilirubin and blood urea nitrogen (BUN) were measured using an automated clinical chemistry analyzer (Hitachi Olympus AU400e, Melville, N.Y.). The results are presented in the Table below.

TABLE 62
Plasma chemistry markers in A431 xenograft model

| ISIS | ALT | AST | Albumin | T. Bilirubin | BUN |
|---|---|---|---|---|---|
| No. | (U/L) | (U/L) | g/dL | (mg/dL) | (mg/dL) |
| PBS | 45.0 | 85.3 | 3.2 | 0.14 | 25 |
| 481464 | 47.0 | 138.8 | 2.8 | 0.14 | 21 |
| 651987 | 68.3 | 239.3 | 2.9 | 0.18 | 18 |
| 696816 | 55.5 | 139.5 | 2.5 | 0.14 | 31 |
| 740167 | 66.0 | 167.0 | 2.8 | 0.16 | 18 |
| 740171 | 59.5 | 182.3 | 3.0 | 0.18 | 18 |
| 740173 | 1375.8 | 964.8 | 2.8 | 5.05 | 19 |
| 740179 | 105.5 | 262.3 | 3.1 | 0.21 | 17 |
| 740187 | 129.3 | 164.5 | 2.9 | 0.14 | 22 |
| 740188 | 3098.0 | 3275.0 | 2.3 | 0.24 | 50 |
| 740191 | 69.8 | 161.8 | 2.9 | 0.14 | 18 |
| 740194 | 2729.8 | 3065.5 | 2.5 | 0.68 | 20 |
| 740196 | 2553.0 | 1607.3 | 3.2 | 0.17 | 24 |
| 740199 | 3552.8 | 3428.5 | 3.4 | 0.28 | 19 |
| 740201 | 190.5 | 367.0 | 2.9 | 0.19 | 19 |
| 740212 | 59.8 | 184.3 | 3.2 | 0.19 | 22 |
| 740216 | 2297.0 | 2663.5 | 2.9 | 0.95 | 20 |
| 740218 | 3984.8 | 2519.8 | 2.1 | 2.77 | 21 |
| 740221 | 4076.0 | 2571.5 | 2.4 | 0.33 | 22 |
| 740223 | 142.3 | 355.5 | 3.2 | 0.19 | 18 |
| 740227 | 3511.5 | 3993.0 | 2.4 | 0.62 | 16 |
| 740233 | 67.3 | 162.5 | 2.8 | 0.16 | 21 |
| 740238 | 165.0 | 362.0 | 2.8 | 0.16 | 20 |
| 740244 | 118.3 | 276.0 | 3.1 | 0.18 | 20 |
| 740246 | 3198.8 | 1579.8 | 2.2 | 0.42 | 22 |
| 740250 | 1710.5 | 1364.3 | 2.8 | 0.16 | 25 |
| 740255 | 1579.5 | 827.3 | 2.8 | 0.34 | 21 |
| 740256 | 3725.5 | 2068.5 | 2.8 | 0.21 | 27 |
| 740261 | 84.3 | 238.8 | 3.0 | 0.20 | 22 |
| 740294 | 1596.3 | 1357.0 | 3.0 | 0.31 | 22 |

### Study 5

### RNA Analysis

[0394] RNA was extracted from tumor tissue for real-time PCR analysis and measurement of human K-Ras mRNA levels using primer probe set RTS3496_MGB, described herein above. Results are presented as average percent inhibition of K-Ras for each treatment group, relative to PBS control, normalized to glyceraldehyde-3-phosphate dehydrogenase or beta-actin mRNA levels. As shown in the Tables below, treatment with Isis antisense oligonucleotides resulted in reduction of human K-Ras mRNA in comparison to the PBS control.

TABLE 63
Antisense mediated inhibition of human K-Ras
mRNA expression in A431 xenograft model

| ISIS No. | Inhibition (%) |
|---|---|
| 651555 | 48 |
| 651987 | 36 |
| 695823 | 26 |
| 695980 | 35 |
| 696018 | 47 |
| 716744 | 25 |
| 716749 | 0 |
| 716754 | 26 |
| 746273 | 9 |
| 746275 | 51 |
| 746276 | 26 |
| 746279 | 31 |
| 746280 | 43 |
| 746285 | 24 |
| 746286 | 51 |
| 746287 | 45 |

### Body Weight Measurements

[0395] Body weights were measured throughout the treatment period. The data is presented in the Table below as the average for each treatment group at various time points. At the end of the study (day 23), organ weights were measured and are presented in the Table below.

TABLE 64
Body and organ weight measurements in A431 xenograft model

| Isis | Body weight (g) | | | | Organ weights (g) | | |
|---|---|---|---|---|---|---|---|
| No. | Day 1 | Day 8 | Day 15 | Day 23 | kidney | liver | spleen |
| PBS | 19.2 | 19.8 | 20.2 | 20.6 | 0.34 | 1.11 | 0.10 |
| 651555 | 18.0 | 17.8 | 18.4 | 18.9 | 0.33 | 1.26 | 0.08 |
| 651987 | 19.1 | 19.4 | 20.2 | 21.4 | 0.30 | 1.34 | 0.14 |
| 695823 | 18.8 | 19.6 | 19.4 | 19.8 | 0.26 | 1.17 | 0.09 |
| 695980 | 20.1 | 20.2 | 20.7 | 21.6 | 0.37 | 1.32 | 0.09 |
| 696018 | 19.0 | 20.3 | 19.7 | 19.8 | 0.31 | 1.32 | 0.08 |
| 716744 | 18.3 | 18.3 | 18.8 | 19.8 | 0.28 | 1.17 | 0.09 |
| 716749 | 19.8 | 20.9 | 20.6 | 21.3 | 0.31 | 1.27 | 0.09 |
| 716754 | 19.4 | 19.2 | 19.5 | 20.0 | 0.28 | 1.11 | 0.09 |
| 746273 | 18.8 | 19.3 | 19.4 | 20.1 | 0.28 | 1.04 | 0.08 |
| 746275 | 18.1 | 18.3 | 18.7 | 19.7 | 0.29 | 1.12 | 0.07 |
| 746276 | 19.9 | 20.9 | 21.1 | 21.7 | 0.33 | 1.31 | 0.09 |
| 746279 | 18.7 | 19.2 | 19.9 | 20.6 | 0.30 | 1.22 | 0.11 |
| 746280 | 18.5 | 19.3 | 19.5 | 20.3 | 0.29 | 1.19 | 0.10 |
| 746285 | 20.2 | 20.5 | 20.8 | 21.3 | 0.33 | 1.33 | 0.08 |
| 746286 | 19.8 | 19.9 | 19.9 | 19.7 | 0.31 | 1.41 | 0.06 |
| 746287 | 19.2 | 19.6 | 19.1 | 19.4 | 0.30 | 1.51 | 0.07 |

### Plasma Chemistry Markers

[0396] To evaluate the effect of antisense oligonucleotides on liver and kidney function, plasma levels of transaminases, total bilirubin and blood urea nitrogen (BUN) were measured using an automated clinical chemistry analyzer (Hitachi Olympus AU400e, Melville, N.Y.). The results are presented in the Table below.

TABLE 65
Plasma chemistry markers in A431 xenograft model

| | ALT | AST | T. Bilirubin | BUN |
|---|---|---|---|---|
| ISIS No. | (U/L) | (U/L) | (mg/dL) | (mg/dL) |
| PBS | 41.8 | 125.0 | 0.12 | 21 |
| 651555 | 65.3 | 207.3 | 0.16 | 23 |
| 651987 | 47.5 | 185.3 | 0.17 | 23 |
| 695823 | 35.0 | 106.8 | 0.15 | 21 |
| 695980 | 36.5 | 115.3 | 0.11 | 18 |
| 696018 | 381.5 | 634.8 | 0.16 | 21 |
| 716744 | 37.3 | 103.5 | .09 | 22 |
| 716749 | 43.0 | 141.0 | .12 | 22 |
| 716754 | 82.8 | 232.3 | .12 | 23 |
| 746273 | 38.8 | 133.3 | .13 | 22 |
| 746275 | 79.5 | 275.5 | 0.18 | 24 |
| 746276 | 95.8 | 340.3 | .19 | 18 |
| 746279 | 85.8 | 276.5 | .17 | 22 |
| 746280 | 84.8 | 281.0 | .18 | 24 |
| 746285 | 336.0 | 696.8 | .20 | 21 |
| 746286 | 1345.8 | 1871.5 | .21 | 20 |
| 746287 | 1454.0 | 2072.5 | .31 | 22 |

TABLE 66
Plasma chemistry markers in A431 xenograft model

| | ALT | AST | T. Bilirubin | BUN |
|---|---|---|---|---|
| ISIS No. | (U/L) | (U/L) | (mg/dL) | (mg/dL) |
| PBS | 35.5 | 73.6 | 0.13 | 20 |
| 651987 | 43.5 | 101.0 | 0.12 | 25 |
| 695785 | 56.5 | 146.5 | 0.17 | 25 |
| 696018 | 126.8 | 197.8 | 0.18 | 19 |
| 696044 | 734.5 | 871.3 | 0.24 | 16 |

### Example 14: Tolerability of Antisense Oligonucleotides Targeting Human K-Ras mRNA in Sprague-Dawley Rats

[0397] The antisense oligonucleotides described in the studies above were also tested for in vivo tolerability in Sprague-Dawley rats.

[0398] Groups of four Sprague-Dawley rats were injected subcutaneously once per week for 6 weeks, for a total of 7 treatments, with 50 mg/kg of an antisense oligonucleotide. A control group of rats was injected subcutaneously once per week for 6 weeks with PBS. Two days after the last dose rats were euthanized and organs and plasma were harvested for further analysis. Body weights were measured throughout the study.

[0399] To evaluate the effect of the antisense oligonucleotides on hepatic function, plasma concentrations of transaminases (ALT, AST), Albumin (Alb) and total bilirubin (T. Bil.) were measured using an automated clinical chemistry analyzer (Hitachi Olympus AU400e, Melville, N.Y.).

[0400] To evaluate the effect of the antisense oligonucleotides on kidney function, plasma concentrations of blood urea nitrogen (BUN) and creatinine (Cre) were measured using an automated clinical chemistry analyzer (Hitachi Olympus AU400e, Melville, N.Y.). Albumin (Alb) was also measured. Total urine protein (Micro Total Protein (MTP)) and urine creatinine levels as well as the ratio of total urine protein to creatinine (MTP/CREA) were also determined.

[0401] Liver, spleen, and kidney weights were measured at the end of the study.

[0402] The results are presented in the Tables below and show that many antisense oligonucleotides targeting human K-Ras were well tolerated in Sprague Dawley rats.

TABLE 67
Body and organ weights

| Isis | Body weight (g) on indicated study day | | | | | | | Liver | Spleen | Kidney |
|---|---|---|---|---|---|---|---|---|---|---|
| No. | 1 | 8 | 15 | 22 | 29 | 36 | 43 | (g) | (g) | (g) |
| PBS | 348.8 | 371.0 | 407.0 | 425.8 | 443.3 | 463.0 | 478.0 | 16.9 | 0.84 | 3.6 |
| 651530 | 351.3 | 377.8 | 408.5 | 432.0 | 449.5 | 461.5 | 466.0 | 17.1 | 1.26 | 3.5 |
| 651555 | 369.8 | 385.5 | 414.3 | 424.3 | 433.3 | 439.8 | 443.3 | 17.7 | 2.50 | 3.6 |
| 651587 | 357.0 | 375.3 | 412.0 | 429.3 | 437.0 | 442.5 | 450.5 | 16.8 | 1.40 | 3.7 |
| 651987 | 350.8 | 375.3 | 403.0 | 415.5 | 425.8 | 434.5 | 439.3 | 19.2 | 1.74 | 3.5 |
| 695785 | 351.5 | 364.3 | 384.5 | 389.5 | 393.0 | 395.3 | 409.5 | 17.8 | 2.51 | 3.9 |
| 695823 | 352.8 | 372.5 | 398.5 | 414.3 | 423.8 | 434.0 | 440.8 | 16.7 | 1.23 | 3.4 |
| 695980 | 363.5 | 379.8 | 407.8 | 416.8 | 419.5 | 422.8 | 429.3 | 17.6 | 3.06 | 3.8 |
| 695995 | 332.3 | 349.5 | 371.8 | 372.5 | 370.0 | 368.8 | 374.3 | 13.4 | 1.29 | 2.9 |

TABLE 68
Plasma and urine clinical chemistry

| | plasma | | | | | | urine | | |
|---|---|---|---|---|---|---|---|---|---|
| | ALT | AST | Alb | BUN | Cre | T. Bil. | Cre | MTP | MTP/ |
| Isis No. | (U/L) | (U/L) | (g/dL) | (mg/dL) | (mg/dL) | (mg/dL) | (mg/dL) | (mg/dL) | CREA |
| PBS | 74.3 | 83.3 | 3.3 | 21.6 | 0.32 | 0.14 | 118.5 | 117.8 | 1.0 |
| 549148 | 56.5 | 89.8 | 3.4 | 22.5 | 0.42 | 0.13 | 96.8 | 366.3 | 3.8 |
| 651530 | 90.8 | 96.0 | 3.4 | 20.6 | 0.38 | 0.14 | 104.8 | 415.8 | 4.0 |
| 651555 | 95.3 | 116.0 | 3.0 | 27.8 | 0.40 | 0.13 | 84.5 | 547.3 | 6.5 |
| 651587 | 88.8 | 102.8 | 3.1 | 40.6 | 0.66 | 0.15 | 66.5 | 675.0 | 10.2 |
| 651987 | 62.8 | 65.8 | 2.1 | 46.5 | 0.58 | 0.19 | 92.8 | 569.8 | 6.1 |
| 695785 | 97.0 | 87.3 | 3.0 | 24.8 | 0.38 | 0.13 | 63.0 | 585.3 | 9.3 |
| 695823 | 73.5 | 87.8 | 3.9 | 27.1 | 0.47 | 0.16 | 89.3 | 421.3 | 4.7 |
| 695980 | 69.0 | 109.8 | 3.3 | 27.1 | 0.50 | 0.13 | 71.0 | 488.8 | 6.9 |
| 695995 | 240.3 | 203.5 | 4.0 | 29.3 | 0.53 | 0.25 | 61.0 | 244.8 | 4.0 |

### Example 15: Tolerability of Antisense Oligonucleotides Targeting Human K-Ras mRNA in Sprague-Dawley Rats

[0403] The antisense oligonucleotides described in the studies above were also tested for in vivo tolerability in Sprague-Dawley rats.

[0404] Groups of four Sprague-Dawley rats were injected subcutaneously once per week for 6 weeks, for a total of 7 treatments, with 50 mg/kg of an antisense oligonucleotide. A control group of rats was injected subcutaneously once per week for 6 weeks with PBS. Two days after the last dose rats were euthanized and organs and plasma were harvested for further analysis. Body weights were measured throughout the study.

[0405] To evaluate the effect of the antisense oligonucleotides on hepatic function, plasma concentrations of transaminases (ALT, AST), Albumin (Alb) and total bilirubin (T. Bil.) were measured using an automated clinical chemistry analyzer (Hitachi Olympus AU400e, Melville, N.Y.).

[0406] To evaluate the effect of the antisense oligonucleotides on kidney function, plasma concentrations of blood urea nitrogen (BUN) and creatinine (Cre) were measured using an automated clinical chemistry analyzer (Hitachi Olympus AU400e, Melville, N.Y.). Albumin (Alb) was also measured. Total urine protein (Micro Total Protein (MTP)) and urine creatinine levels as well as the ratio of total urine protein to creatinine (MTP/CREA) were also determined.

[0407] Liver, spleen, and kidney weights were measured at the end of the study.

[0408] The results are presented in the Tables below and show that many antisense oligonucleotides targeting human K-Ras were well tolerated in Sprague Dawley rats.

TABLE 69
Body and organ weights

| | Body weight (g) on indicated study day | | | | | | | | | |
|---|---|---|---|---|---|---|---|---|---|---|
| Isis No. | 1 | 8 | 15 | 22 | 29 | 36 | 43 | Liver (g) | Spleen (g) | Kidney (g) |
| PBS | 252.3 | 321.5 | 377.8 | 417.8 | 456.8 | 453.8 | 492.8 | 20.5 | 0.91 | 3.42 |
| 696018 | 243.3 | 298.8 | 329.5 | 344.5 | 348.8 | 340.8 | 333.3 | 13.5 | 2.03 | 3.38 |
| 696044 | 245.5 | 299.0 | 336.5 | 350.5 | 345.0 | 351.5 | 348.5 | 15.8 | 2.57 | 3.52 |
| 716600 | 240.0 | 287.5 | 316.8 | 333.5 | 347.0 | 351.5 | 360.3 | 17.2 | 1.87 | 3.28 |
| 716655 | 247.8 | 305.0 | 341.8 | 360.3 | 370.5 | 374.3 | 363.5 | 16.6 | 3.23 | 4.86 |
| 740233 | 247.0 | 305.3 | 347.3 | 375.3 | 393.0 | 389.0 | 383.5 | 16.9 | 2.13 | 3.82 |
| 746275 | 242.8 | 305.5 | 350.8 | 372.0 | 392.5 | 401.8 | 405.0 | 17.5 | 2.51 | 3.85 |

TABLE 70
Plasma and urine clinical chemistry

| | plasma | | | | | | urine | | |
|---|---|---|---|---|---|---|---|---|---|
| Isis | ALT | AST | Alb | BUN | Cre | T. Bil. | Cre | MTP | MTP/ |
| No. | (U/L) | (U/L) | (g/dL) | (mg/dL) | (mg/dL) | (mg/dL) | (mg/dL) | (mg/dL) | CREA |
| PBS | 42.0 | 59.5 | 3.3 | 17.1 | 0.32 | 0.14 | 60.8 | 69.3 | 1.14 |
| 696018 | 47.5 | 84.8 | 2.9 | 20.5 | 0.41 | 0.19 | 32.0 | 113.3 | 3.54 |
| 696044 | 49.5 | 104.8 | 2.2 | 20.7 | 0.34 | 0.12 | 42.0 | 543.5 | 12.94 |
| 716600 | 38.3 | 71.8 | 2.5 | 17.2 | 0.32 | 0.10 | 60.3 | 455.3 | 7.56 |
| 716655 | 48.3 | 62.8 | 1.8 | 60.9 | 0.66 | 0.08 | 67.5 | 618.5 | 9.16 |
| 740233 | 53.3 | 126.3 | 2.8 | 19.3 | 0.33 | 0.13 | 52.5 | 421.0 | 8.02 |
| 746275 | 212.8 | 222.0 | 2.9 | 18.6 | 0.37 | 0.17 | 50.5 | 330.8 | 6.55 |

### Example 16: Comparative Evaluation of Potency for Gen1.0 and Gen2.5 Human K-RAS Antisense Oligonucleotides

[0409] Antisense oligonucleotides described above and Isis No. 6957 were tested at various doses in A431 cells. Isis No. 6957, described in U.S. Pat. No. 6,784,290, consists of 2′-deoxynucleosides linked via phosphorothioate internucleoside linkages, and the sequence is CAGTGCCTGCGCCGCGCTCG (SEQ ID NO: 2193). Isis No. 549148, which does not target K-Ras, was included as a negative control. A431 cells were plated at a density of 10,000 cells per well and incubated with concentrations of antisense oligonucleotide specified in Table 24 below. After 24 hours, RNA was isolated from the cells and K-Ras mRNA levels were measured by quantitative real-time PCR. RTS3496_MGB primer probe set was used to measure K-Ras mRNA levels. K-Ras mRNA levels were normalized to beta-actin mRNA levels. Results are presented as percent inhibition of K-Ras mRNA, relative to untreated control cells.

[0410] As illustrated in the Table below, the new antisense oligonucleotides were much more potent than Isis No. 6957, which exhibited minimal inhibition of K-Ras.

TABLE 71
Dose-dependent inhibition of human K-Ras mRNA expression
by free-uptake of ISIS oligonucleotides

| | Inhibition (%) | | | | | |
|---|---|---|---|---|---|---|
| | | | | | 3333 | |
| ISIS No. | 41.2 nM | 123 nM | 370 nM | 1111 nM | nM | 10000 nM |
| 6957 | 0 | 1 | 2 | 0 | 7 | 17 |
| 549148 | 6 | 4 | 1 | 2 | 3 | 1 |
| 651530 | 14 | 26 | 54 | 69 | 90 | 92 |
| 651555 | 15 | 32 | 57 | 63 | 77 | 84 |
| 651587 | 17 | 22 | 69 | 78 | 80 | 87 |
| 651987 | 27 | 40 | 70 | 79 | 88 | 91 |
| 695785 | 13 | 39 | 53 | 73 | 85 | 87 |
| 695823 | 18 | 31 | 43 | 67 | 77 | 81 |
| 695980 | 19 | 37 | 65 | 76 | 84 | 88 |
| 695995 | 18 | 32 | 45 | 74 | 84 | 90 |

### Example 17: Pharmacodynamics and Toxicological Profile of Human K-Ras Antisense Oligonucleotides in COLO205 Adenocarcinoma Xenograft Model

[0411] Female, 6-8 week old NCr nude mice (Taconic Biosciences, Hudson, N.Y.) were inoculated with human colorectal adenocarcinoma COLO205 cells and treated with antisense oligonucleotides or with PBS. K-Ras expression and tolerability of the oligonucleotides in the mice were evaluated.

### Treatment

[0412] For tumor development, the mice were each inoculated in the right lateral fat pad with 3×10⁶ COLO205 cells in 50% Matrigel (BD Bioscience). Antisense oligonucleotide treatment started around day 10 after tumor inoculation when the mean tumor size reached approximately 200 mm³. The mice were subcutaneously injected with 30 or 50 mg/kg/week three times per week for three weeks, for a total of nine doses at 150 or 250 mg/kg/week, with antisense oligonucleotide or PBS. RNA was extracted from tumor tissue for real-time PCR analysis. The mice were euthanized 24 hours after the last dose, and organs and plasma were harvested for further analysis. Body weights were measured throughout the study. Liver, spleen, and kidney weights were measured at the end of the study. The results are presented in the Tables below, demonstrating that many antisense oligonucleotides targeting human K-Ras resulted in reduction of K-Ras mRNA levels, and were well tolerated.

### RNA Analysis

[0413] RNA was extracted from tumor tissue for real-time PCR analysis and measurement of human K-Ras mRNA levels using primer probe set RTS3496_MGB, described herein above. Results are presented as average percent inhibition of K-Ras for each treatment group, relative to PBS control, normalized to glyceraldehyde-3-phosphate dehydrogenase mRNA levels. As shown in the tables below, treatment with Isis antisense oligonucleotides resulted in reduction of human K-Ras mRNA in comparison to the PBS control.

TABLE 72
Inhibition of human K-Ras mRNA
expression in COLO205 xenograft model

| ISIS No. | mg/kg/week | Inhibition (%) |
|---|---|---|
| PBS | N/A | 0 |
| 651555 | 250 | 47 |
| | 150 | 23 |
| 651987 | 250 | 36 |
| | 150 | 30 |
| 695980 | 250 | 41 |
| | 150 | 28 |
| 696044 | 250 | 43 |
| | 150 | 45 |
| 716600 | 250 | 49 |
| | 150 | 43 |
| 716655 | 250 | 36 |
| | 150 | 36 |
| 716772 | 250 | 33 |
| | 150 | 27 |
| 740179 | 250 | 24 |
| | 150 | 28 |
| 740256 | 150 | 46 |

### Body Weight Measurements

[0414] Body weights were measured throughout the treatment period. The data is presented in the tables below as the average for each treatment group at various time points. At the end of the study, organ weights were measured and are presented in the table below.

TABLE 73
Body and organ weight measurements

| | | Body weight (g) | | | | | | |
|---|---|---|---|---|---|---|---|---|
| ISIS | mg/kg/ | | | day | day | Organ weight (g) | | |
| No. | week | day 1 | day 9 | 16 | 23 | kidney | liver | spleen |
| PBS | N/A | 21.9 | 21.5 | 19.7 | 21.5 | 0.3 | 1.1 | 0.10 |
| 651555 | 250 | 20.4 | 19.0 | 18.2 | 17.6 | 0.3 | 1.0 | 0.05 |
| | 150 | 18.5 | 21.9 | 19.9 | 21.3 | 0.2 | 1.2 | 0.09 |
| 651987 | 250 | 20.7 | 20.3 | 18.0 | 16.7 | 0.3 | 1.1 | 0.05 |
| | 150 | 20.6 | 18.1 | 16.0 | 16.4 | 0.2 | 1.0 | 0.06 |
| 695980 | 250 | 20.6 | 19.7 | 17.9 | 19.4 | 0.4 | 1.2 | 0.14 |
| | 150 | 19.5 | 19.8 | 20.3 | 20.9 | 0.3 | 1.1 | 0.06 |
| 696044 | 250 | 21.1 | 20.7 | 17.0 | 18.0 | 0.3 | 1.7 | 0.14 |
| | 150 | 21.1 | 20.7 | 19.3 | 19.1 | 0.3 | 1.6 | 0.09 |
| 716600 | 250 | 19.9 | 19.7 | 18.5 | 18.2 | 0.3 | 1.5 | 0.11 |
| | 150 | 20.3 | 20.2 | 19.7 | 19.2 | 0.3 | 1.3 | 0.07 |
| 716655 | 250 | 22.8 | 19.1 | 18.3 | 16.7 | 0.3 | 1.4 | 0.05 |
| | 150 | 23.8 | 19.1 | 17.5 | 17.1 | 0.3 | 1.4 | 0.03 |
| 716772 | 250 | 21.5 | 20.0 | 17.6 | 19.7 | 0.3 | 1.3 | 0.09 |
| | 150 | 20.7 | 18.5 | 17.3 | 17.1 | 0.2 | 1.1 | 0.06 |
| 740179 | 250 | 21.0 | 22.3 | 20.4 | 21.6 | 0.3 | 1.8 | 0.18 |
| | 150 | 20.9 | 17.4 | 17.9 | 18.0 | 0.3 | 1.2 | 0.09 |
| 740256 | 150 | 21.2 | 21.2 | 18.9 | 19.9 | 0.3 | 1.4 | 0.09 |

### Plasma Chemistry Markers

[0415] Using an automated clinical chemistry analyzer (Hitachi Olympus AU400e, Melville, N.Y.), plasma concentrations of transaminases (ALT, AST) and total bilirubin (T. Bil.) were measured to evaluate the effect of the antisense oligonucleotides on hepatic function, and plasma concentrations of blood urea nitrogen (BUN) were measured to evaluate the effect of the antisense oligonucleotides on kidney function. Albumin (Alb) was also measured. The results are presented in the Tables below and show that many antisense oligonucleotides targeting human K-Ras mRNA were well tolerated in the COLO205 adenocarcinoma xenograft model.

TABLE 74
Plasma clinical chemistry

| ISIS | mg/kg/ | ALT | AST | Alb | BUN | T. bil |
|---|---|---|---|---|---|---|
| No. | week | (U/L) | (U/L) | (g/dL) | (mg/dL) | (mg/dL) |
| PBS | N/A | 29.5 | 127.0 | 3.7 | 16.7 | 0.14 |
| 651555 | 250 | 218.3 | 548.0 | 3.7 | 23.6 | 0.16 |
| | 150 | 47.8 | 145.3 | 3.6 | 18.5 | 0.15 |
| 651987 | 250 | 371.8 | 620.8 | 3.8 | 23.1 | 0.19 |
| | 150 | 232.8 | 493.0 | 3.9 | 20.9 | 0.20 |
| 695980 | 250 | 64.3 | 248.3 | 3.4 | 22.4 | 0.11 |
| | 150 | 37.0 | 146.3 | 3.9 | 20.1 | 0.15 |
| 696044 | 250 | 1176.5 | 1267.0 | 3.7 | 20.2 | 0.85 |
| | 150 | 96.8 | 298.8 | 4.4 | 20.8 | 0.24 |
| 716600 | 250 | 647.3 | 1128.0 | 3.5 | 22.9 | 0.38 |
| | 150 | 49.3 | 294.0 | 4.1 | 19.7 | 0.18 |
| 716655 | 250 | 367.5 | 923.0 | 3.9 | 29.2 | 0.94 |
| | 150 | 86.5 | 398.0 | 4.4 | 27.8 | 0.17 |
| 716772 | 250 | 65.0 | 285.0 | 4.0 | 29.3 | 0.13 |
| | 150 | 50.8 | 301.5 | 4.0 | 28.7 | 0.13 |
| 740179 | 250 | 396.5 | 400.0 | 3.6 | 20.5 | 0.15 |
| | 150 | 95.7 | 255.7 | 4.3 | 20.6 | 0.16 |
| 740256 | 150 | 225.3 | 488.5 | 3.6 | 22.0 | 0.32 |

### Example 18: Effect of Human K-Ras Antisense Oligonucleotides on Proliferation of H460 Cells (3D Assays)

[0416] An in vitro three-dimensional (3D) model was used to assess the effects of human K-Ras antisense oligonucleotides on mutant K-Ras cancer tumor cell growth. Human mutant K-Ras non-small-cell lung cancer cells (NCI-H460) were grown as spheroids on Thermo Scientific™ Nunclon™ Sphera™ ultra-low attachment microwell plates. Cancer spheroids simulate the 3D structures of tumor growth, allowing the study of tumor progression and efficacy of antisense oligonucleotides in vitro.

### Treatment

[0417] NCI-H460 cells were plated at a density of 1000 cells per well and incubated with various doses of antisense oligonucleotide or with PBS for a period of eight days. K-Ras mRNA expression and effects of the oligonucleotides on spheroid volume were evaluated and are presented in the tables below.

### RNA Analysis

[0418] At day six, RNA was isolated from the cells for real-time PCR analysis and human K-Ras mRNA levels were measured using primer probe set RTS3496_MGB, described herein above. Results are presented as average percent inhibition of K-Ras for each treatment group, relative to PBS control, normalized to beta-actin mRNA levels. Treatment with Isis antisense oligonucleotides resulted in reduction of human K-Ras mRNA in comparison to the PBS control. The half maximal inhibitory concentration (IC₅₀) of each oligonucleotide is also presented.

TABLE 75
Dose-dependent inhibition of human K-Ras mRNA
expression by antisense oligonucleotides

| | Inhibition (%) | | | | | IC₅₀ |
|---|---|---|---|---|---|---|
| ISIS No. | 12.3 nM | 37.0 nM | 111 nM | 333 nM | 1000 nM | (μM) |
| 651530 | 21.9 | 53.3 | 71.8 | 81.6 | 93.1 | 0.33 |
| 651555 | 19.9 | 44.2 | 75.9 | 84.3 | 94.5 | 0.43 |
| 651587 | 36.2 | 60.1 | 79.1 | 86.4 | 93.7 | 0.23 |
| 651987 | 32.9 | 69.9 | 81.8 | 85.7 | 93.3 | 0.2 |
| 695785 | 3.6 | 33.3 | 63.1 | 75.9 | 77.6 | 0.65 |
| 695823 | 20.4 | 37.3 | 56.2 | 79.3 | 84.3 | 0.75 |
| 695980 | 29.0 | 65.3 | 82.9 | 83.4 | 94.0 | 0.23 |
| 695995 | 20.8 | 49.7 | 69.0 | 81.4 | 86.5 | 0.35 |
| 696018 | 19.4 | 55.4 | 76.6 | 81.5 | 91.4 | 0.3 |
| 696044 | 43.7 | 76.8 | 86.8 | 94.2 | 97.6 | 0.15 |
| 716600 | 20.4 | 52.4 | 79.9 | 87.5 | 95.6 | 0.33 |
| 716655 | 10.8 | 41.0 | 73.4 | 82.7 | 92.5 | 0.7 |
| 716772 | 20.1 | 54.7 | 74.6 | 79.0 | 87.1 | 0.3 |
| 740179 | 17.2 | 52.2 | 79.0 | 84.7 | 93.6 | 0.33 |
| 740191 | 33.0 | 64.3 | 80.6 | 90.0 | 95.0 | 0.23 |
| 740223 | 12.9 | 52.7 | 75.3 | 83.4 | 92.7 | 0.38 |
| 740256 | 24.9 | 65.6 | 80.1 | 88.2 | 94.6 | 0.3 |
| 746275 | 16.5 | 67.6 | 79.6 | 87.8 | 94.5 | 0.3 |

### Spheroid Volume Analysis

[0419] At day eight, H460 spheroids were photographed and their relative volume was measurement using ImageJ. Results are presented as average percent reduction in spheroid volume for each treatment group, relative to PBS control. The half maximal growth inhibitory concentration (GI %) of each oligonucleotide is also presented.

TABLE 76
Relative spheroid volume at 8 days relative to untreated NCI-H460 cells

| ISIS No. | GI₅₀ (μM) |
|---|---|
| 651530 | 1.7 |
| 651555 | 2.0 |
| 651587 | 1.1 |
| 651987 | 1.1 |
| 695785 | 5.0 |
| 695823 | 6.0 |
| 695980 | 0.7 |
| 695995 | 2.5 |
| 696018 | 0.8 |
| 696044 | 0.8 |
| 716600 | 1.3 |
| 716655 | 2.2 |
| 716772 | 4.0 |
| 740179 | 1.1 |
| 740191 | 1.2 |
| 740223 | 1.5 |
| 740256 | 0.8 |
| 746275 | 0.9 |

### Example 19: H358 Xenograft Study of Tumor Volume

[0420] A K-Ras mutant mouse xenograft model for non-small cell lung cancer (NSCLC) was generated and used to study the efficacy of lead antisense oligonucleotides ISIS Nos. 651987 and 746275, as compared to untreated mice and to mice treated with ISIS No. 549148 as a negative control. The mice each were inoculated with NCI-H358 human NSCLC cells for tumor development.

### Treatment

[0421] Thirty-two female, athymic nude mice (CrTac:NCr-Foxn1^{nu}; Taconic Biosciences, Inc., Hudson, N.Y.), 6-8 weeks old with starting weights of 19-21 g, were divided into four groups, eight subjects per treatment group with exception of the control group treated with ISIS No. 549148, which contained five subjects. The mice were inoculated with 5×10⁶ NCI-H358 cells in 50% Matrigel (BD Bioscience) into the mammary fat pad. Antisense oligonucleotide treatment started at day 10-14 after tumor inoculation when the mean tumor size reached approximately 200 mm³. The mice were subcutaneously injected with antisense oligonucleotide at 50 mg/kg, five times per week (250 mg/kg/week) for 4.5 weeks (for a total of 22 doses), or with PBS as untreated control. Effects of KRAS antisense oligonucleotides on tumor K-Ras mRNA expression and tumor growth as well as tolerability of KRAS oligonucleotides in mice were evaluated. The body weights of the mice were measured once per week. At the end of the study (day 33), the mice were sacrificed, organs and tumor harvested, and K-Ras mRNA levels in the tumor were measured.

### RNA Analysis

[0422] RNA was extracted from tumor tissue for real-time PCR analysis and measurement of human K-Ras mRNA levels using primer probe set RTS3496_MGB, described herein above. Results are presented the Table below as average percent inhibition of K-Ras for each treatment group, relative to PBS control, normalized to beta-actin mRNA levels.

TABLE 77
Percent inhibition of human K-Ras mRNA expression
relative to control in H358 xenograft model

| ISIS No. | Inhibition (%) |
|---|---|
| 549148 | 0 |
| 651987 | 36 |
| 746275 | 56 |

### Body Weight Measurements

[0423] Body weights were measured throughout the treatment period. At the end of the study (day 33), organs were weighed and the data is presented in the Table below as the average for each treatment group at various time points.

TABLE 78
Body and organ weight measurements in H358 xenograft model

| | Body weight (g) | | | | | Organ weights (g) | | |
|---|---|---|---|---|---|---|---|---|
| Isis No. | Day 6 | Day 15 | Day 20 | Day 26 | Day 32 | kidney | liver | spleen |
| PBS | 22.6 | 23.2 | 23.4 | 23.0 | 23.2 | 0.32 | 1.29 | 0.14 |
| 549148 | 20.6 | 21.3 | 21.8 | 22.0 | 22.6 | 0.34 | 1.83 | 0.18 |
| 651987 | 23.1 | 22.5 | 21.7 | 21.2 | 21.0 | 0.34 | 1.54 | 0.10 |
| 746275 | 22.0 | 22.3 | 22.6 | 22.6 | 22.9 | 0.34 | 1.62 | 0.15 |

### Plasma Chemistry Markers

[0424] To evaluate the effect of antisense oligonucleotides on liver and kidney function, plasma levels of transaminases, total bilirubin and blood urea nitrogen (BUN) were measured using an automated clinical chemistry analyzer (Hitachi Olympus AU400e, Melville, N.Y.). The results are presented in the Table below.

TABLE 79
Plasma chemistry markers in H358 xenograft model

| | ALT | AST | Albumin | BUN | T. Bilirubin |
|---|---|---|---|---|---|
| ISIS No. | (U/L) | (U/L) | g/dL | (mg/dL) | (mg/dL) |
| PBS | 27.5 | 74.5 | 2.7 | 19.1 | 0.14 |
| 549148 | 68.6 | 102.2 | 2.8 | 19.0 | 0.11 |
| 651987 | 235.6 | 347.3 | 2.5 | 21.6 | 0.14 |
| 746275 | 258.6 | 403.8 | 2.4 | 23.5 | 0.12 |

### Tumor Volume

[0425] To evaluate the effect of antisense oligonucleotides on tumor volume, tumor sites were measured at various time points. The results are presented in the Table below.

TABLE 80
Relative tumor volume, % from day one in H358 xenograft model

| Isis No. | Day 1 | Day 5 | Day 14 | Day 19 | Day 25 | Day 31 |
|---|---|---|---|---|---|---|
| PBS | 100 | 186 | 337 | 378 | 1138 | 1908 |
| 549148 | 100 | 170 | 322 | 353 | 968 | 1109 |
| 651987 | 100 | 141 | 184 | 154 | 381 | 387 |
| 746275 | 100 | 142 | 162 | 148 | 265 | 250 |

[0426] Two lead antisense oligonucleotides, ISIS 651987 and ISIS 746275, inhibited tumor growth over the course of the study.

### Example 20: Effect of a KRAS ASO on the Proliferation of KRAS Mutant and KRAS Wild Type Tumour Cells In Vitro (3D)

[0427] The effect of 651987 on KRAS mRNA levels and proliferation in 3D was assessed in vitro in a panel of lung, colon and pancreatic cancer cell lines expressing mutant or wild type KRAS. The correlation between down regulation of KRAS mRNA (IC₅₀) and inhibition of growth in soft agar (IC₅₀) is shown in the Table below. The observations from this study show that 651987 down-regulates mutant and wild type KRAS isoforms and has selective phenotypic effects on KRAS mutant cells in vitro.

### RNA Analysis

[0428] For analysis of effect on KRAS mRNA expression cells were plated into 96-well plates and treated with dose responses of KRAS ASO for a minimum of 48 hours. For analysis of mRNA expression cell lysates prepared using FastLane Cell Probe kit (Qiagen) were used in real-time one-step RT-PCR reactions performed on a ABI 7900HT instrument (Applied Biosystems, Thermo Fisher Scientific) or a Lightcycler 480 instrument (Roche). Gene expression values were calculated using the using the comparative Ct (−ΔΔCt) method as previously described in User Bulletin #2 ABI PRISM 7700 Sequence Detection System 10/2001, using GAPDH or 18S rRNA CT values for normalisation. ABI FAM MGB Assay Probes for human KRAS (Hs00364284_g1), human GAPDH (4333764F), eukaryotic 18S rRNA (4333760F) were from Thermo Fisher Scientific.

### 3D Colony Assays

[0429] Colony assays were performed in 96 well plates. Cells (500-2000 cells per well) were seeded in 75 μl of 0.3% agar onto a 50 μl 1% agar layer in 10% RPMI-1640 growth media. The agar layers were then covered with 50 μl of media containing treatment taking into account the entire volume of agar and media. Colonies were grown for 7 to 24 days depending upon the cell line and colony formation assessed by scanning on a GelCount scanner (Oxford Optronix, Abingdon, UK) and counting colonies of a specified diameter. PC9 cells were obtained from Akiko Hiraide, Preclinical Sciences R&D, AZ, Japan. All other cells were obtained from ATCC.

TABLE 81
Details of the cell lines used in this study including results of STR
finger print testing, KRAS and other key mutations. Correlation
between IC₅₀ (μM) of KRAS mRNA down-regulation
and inhibition of colony formation by 651987 in KRAS wild type
and mutant cell lines.

| | | STR | | | KRAS | Inhibition |
|---|---|---|---|---|---|---|
| | | finger | | Other | mRNA | of colony |
| | | print | KRAS | mutations/amplifications/ | knockdown | formation |
| Cell Line | Tissue Type | tested | Mutation | deletions | (IC50 μM) | (IC50 μM) |
| A549 | Lung | Pass | G12S | CDKN2A, STK11 | 1.1810 | 1.0065 |
| NCI-H358 | Lung | Pass | G12C | KRAS amp PIK3CA, | 0.5520 | 0.3313 |
| | | | | STK11 | | |
| NCI-H460 | Lung | Pass | Q61H | CDKN2A, TP53, STK11 | 0.3240 | 0.3936 |
| NCI-H2122 | Lung | Pass | G12C | CDKN2A, TP53, STK11 | 0.3740 | 0.4580 |
| SW900 | Lung | Pass | G12V | KRAS amp, TP53, NF1 | 0.7470 | 0.3248 |
| SW480 | Colon | Pass | G12V | KRAS amp, TP53 | 0.4530 | 1.5303 |
| PANC1 | Pancreas | Pass | G12D | CDKN2A, TP53 | 0.2200 | 0.2573 |
| PC9 | Lung | Pass | WT | CDKN2A, EGFR | 0.0710 | 5.9597 |
| NCI-H1437 | Lung | Pass | WT | TP53, MEK | 0.1010 | 6.7957 |
| NCI-H1299 | Lung | Pass | WT | NRAS | 0.7130 | >10.0 |
| NCI-H1793 | Lung | Pass | WT | CDKN2A, TP53 | 0.0410 | >10.0 |
| COLO201 | Colon | Pass | WT | BRAF, TP53 | 0.2270 | >10.0 |

### Example 21: Tolerability of Antisense Oligonucleotides Targeting K-Ras in Cynomolgus Monkeys

[0430] Eight antisense oligonucleotides were compared for their relative efficacy, tolerability, pharmacokinetic and pharmacodynamic profiles in a repeated-dose study of male cynomolgus monkeys following six weeks of treatment by subcutaneous administration. These antisense oligonucleotides used in the study are described in the table below.

TABLE 82

| | | | SEQ |
|---|---|---|---|
| | | | ID |
| Isis No. | Sequence | Chemistry | NO. |
| 651530 | TGACTAATAGCAGTGG | kkk-10-kkk | 239 |
| 651555 | TTTAATGTCACAAGCA | kkk-10-kkk | 615 |
| 651587 | GATTTGTCAGCAGGAC | kkk-10-kkk | 621 |
| 651987 | GCTATTAGGAGTCTTT | kkk-10-kkk | 272 |
| 695785 | AATGGTGAATATCTTC | kkk-10-kkk | 569 |
| 695823 | AGGTAAAAGCTAACAG | kkk-10-kkk | 607 |
| 695980 | ATCTTTTAATGTCACA | kkk-10-kkk | 640 |
| 695995 | TCTCTATGAAAGCTCA | kkk-10-kkk | 655 |

### Treatment

[0431] Prior to the study, the monkeys were kept in quarantine during which the animals were observed daily for general health. The monkeys were two to three years old and weighed two to three kg. Observations were recorded for all animals once daily during the acclimation and pre-treatment period, twice daily (before and after dosing on the day of dosing, in the morning and afternoon on non-dosing day) during the treatment period, and prior to the necropsy.

[0432] All study animals were weighed once prior to group assignment during the acclimation period and once weekly during the treatment period. Body weights were taken prior to the necropsy on the day of scheduled sacrifice. Blood samples were collected from the cephalic or femoral vein for evaluation of hematology, coagulation, and clinical chemistry. Fresh urine samples were collected from all available animals for urinalysis/urine chemistry parameters Animals were fasted overnight prior to blood collection for clinical chemistry and urine collection.

[0433] At the end of the study, the monkeys were sacrificed, necropsied and organs removed. The protocols described in the Example were approved by the Institutional Animal Care and Use Committee (IACUC).

[0434] Thirty-six male cynomolgus monkeys were divided into nine groups of four monkeys each, with one group treated with 0.9% saline as a negative control. The eight antisense oligonucleotides were subcutaneously administered 40 mg/kg every other day for the first week (Days 1, 3, 5 and 7) for a total of four loading doses, and once a week thereafter (days 14, 21, 28, 35, and 42 or 43) for 6 weeks. Several clinical endpoints were measured over the course of the study. Tail bleeds were conducted at 1 week prior to the first subcutaneous administration, then again at days 9, 16, 30, 44, 58, 72, and 86.

### Body and Organ Weights

[0435] Body weight was assessed weekly. Body weights at some of these time points and organ weights (at day 44) are presented in the Table below. No remarkable effects of the antisense oligonucleotides on body weight were observed.

TABLE 83
Body and organ weights of cynomolgus monkeys treated with antisense oligonucleotides

| | | | | | Organ (g) | | | | | | | |
|---|---|---|---|---|---|---|---|---|---|---|---|---|
| | | | | | | | | | mesenteric | | | |
| | Body (g) | | | | | | | mandibular | lymph | | | |
| Isis No. | day 1 | day 14 | day 28 | day 44 | heart | kidney | liver | lymph node | node | spleen | testes | thymus |
| Saline | 2632 | 2653 | 2737 | 2788 | 11.1 | 12.5 | 54.4 | 0.5 | 1.5 | 3.2 | 1.1 | 4.1 |
| 651530 | 2503 | 2563 | 2646 | 2695 | 10.2 | 14.0 | 59.3 | 0.6 | 1.5 | 3.0 | 1.3 | 2.3 |
| 651555 | 2572 | 2628 | 2718 | 2735 | 10.6 | 15.0 | 65.0 | 0.5 | 2.3 | 4.8 | 1.5 | 3.6 |
| 651587 | 2326 | 2354 | 2409 | 2393 | 9.3 | 13.7 | 53.4 | 0.6 | 1.4 | 3.3 | 1.2 | 1.7 |
| 651987 | 2579 | 2615 | 2715 | 2833 | 10.5 | 15.4 | 70.5 | 0.7 | 2.0 | 5.1 | 1.1 | 2.5 |
| 695785 | 2652 | 2730 | 2756 | 2753 | 11.1 | 16.4 | 68.5 | 0.6 | 2.5 | 3.5 | 0.9 | 2.5 |
| 695823 | 2741 | 2819 | 2883 | 2930 | 10.0 | 13.5 | 62.3 | 0.5 | 1.7 | 3.3 | 1.5 | 3.0 |
| 695980 | 2856 | 2947 | 2990 | 3008 | 11.0 | 14.5 | 72.4 | 0.6 | 1.9 | 4.7 | 1.3 | 3.2 |
| 695995 | 2874 | 2991 | 3074 | 3283 | 11.8 | 13.9 | 66.4 | 0.6 | 2.3 | 3.4 | 2.2 | 2.5 |

### RNA Analysis

[0436] At the end of the study, RNA was extracted from monkey livers and kidneys for real-time PCR analysis of measurement of mRNA expression of K-Ras. As above, primer probe set RTS3496_MGB was used, and the results for each group were averaged and presented as percent inhibition of mRNA, relative to the PBS control, normalized with rhesus cyclophilin A. The results of two trials were averaged and are presented in the Table below.

TABLE 84
Percent inhibition of K-Ras mRNA in the cynomolgus
monkey liver relative to the PBS control

| ISIS No. | % inhibition | SEQ ID NO |
|---|---|---|
| 651530 | 73 | 239 |
| 651555 | 81 | 615 |
| 651587 | 78 | 621 |
| 651987 | 84 | 272 |
| 695785 | 88 | 569 |
| 695823 | 71 | 607 |
| 695980 | 45 | 640 |
| 695995 | 71 | 655 |

TABLE 85
Inhibition of K-Ras mRNA relative to the PBS control
in various monkey tissues after treatment with ISIS 651987

| | Oligo ID |
|---|---|
| | 651987 |
| Tissue | % Inhibition |
| Liver | 84 |
| Kidney | 69 |
| Lung | 23 |
| Duodenum | 53 |
| Pancreas | 21 |
| Heart | 32 |

### Hematology

[0437] To evaluate any effect of ISIS oligonucleotides in cynomolgus monkeys on hematologic parameters, blood samples of approximately 1.3 mL of blood were collected on day 44 from each of the study animals in tubes containing K₂-EDTA. Samples were analyzed for red blood cell (RBC) count, white blood cells (WBC) count, basophil count (BAS), as well as for platelet count (PLT) and mean platelet volume (MPV) using an ADVIA120 hematology analyzer (Bayer, USA). The data is presented in the Table below.

TABLE 86
Hematology

| | BAS | PLT | MPV | RBC | WBC |
|---|---|---|---|---|---|
| ISIS No. | 10³/uL | 10³/uL | fL | 10⁶/uL | 10³/uL |
| Saline | 0.02 | 346 | 8.4 | 5 | 12 |
| 651530 | 0.02 | 385 | 8.3 | 5 | 11 |
| 651555 | 0.03 | 340 | 8.8 | 6 | 12 |
| 651587 | 0.03 | 450 | 7.3 | 6 | 12 |
| 651987 | 0.02 | 362 | 8.1 | 6 | 9 |
| 695785 | 0.03 | 339 | 8.5 | 6 | 11 |
| 695823 | 0.03 | 305 | 8.3 | 6 | 9 |
| 695980 | 0.02 | 301 | 8.4 | 5 | 7 |
| 695995 | 0.03 | 288 | 11.2 | 5 | 12 |

[0438] The data indicate the oligonucleotides did not cause any significant changes in hematologic parameters outside the expected range for antisense oligonucleotides at this dose. These antisense oligonucleotides were well tolerated in terms of hematologic parameters in the monkeys.

### Liver and Kidney Function

[0439] To evaluate the effect of these antisense oligonucleotides on liver and kidney function, samples of blood, plasma, serum and urine were collected from all study groups on day 44. The blood samples were collected via femoral venipuncture, 48 hrs post-dosing. The monkeys were fasted overnight prior to blood collection. Approximately 1.5 mL of blood was collected from each animal into tubes without anticoagulant for serum separation. Levels of the various markers were measured using an automated clinical chemistry analyzer (Hitachi Olympus AU400e, Melville, N.Y.). Total urine protein and urine creatinine levels were measured, and the ratio of total urine protein to creatinine (P/C Ratio) was determined.

[0440] To evaluate the effect of the antisense oligonucleotides on hepatic function, plasma concentrations of transaminases (ALT, AST), Albumin (Alb) and total bilirubin (“T. Bil”) were measured. To evaluate the effect of the antisense oligonucleotides on kidney function, plasma concentrations of blood urea nitrogen (BUN) and creatinine (Cre) were measured. Urine levels of albumin (Alb), creatinine (Cre) and total urine protein (Micro Total Protein (MTP)) were measured, and the ratio of total urine protein to creatinine (P/C ratio) was determined.

[0441] To evaluate any inflammatory effect of the ISIS oligonucleotides in cynomolgus monkeys, C-reactive protein (CRP), which is synthesized in the liver and which serves as a marker of inflammation, was measured on day 42. For this, blood samples were taken from fasted monkeys, the tubes were kept at room temperature for a minimum of 90 min., and centrifuged at 3,000 rpm for 10 min at room temperature to obtain serum. The results are presented in the Tables below and indicate that most of the antisense oligonucleotides targeting human K-Ras were well tolerated in cynomolgus monkeys.

TABLE 87
Serum and urine clinical chemistry

| | Serum (day 44) | | | | | | | | Urine (day 44) | | | |
|---|---|---|---|---|---|---|---|---|---|---|---|---|
| ISIS | C3 | ALT | AST | Alb | BUN | CRP | Cre | T.bil | Alb | Cre | MTP | P/C |
| No. | mg/dL | U/L | U/L | g/dL | mg/dL | mg/L | mg/dL | mg/dL | g/dL | mg/dL | mg/dL | ratio |
| Saline | 103.3 | 43.3 | 60.0 | 4.0 | 25.1 | 0.27 | 0.78 | 0.24 | 1.0 | 21.5 | 0.00 | 0.00 |
| 651530 | 78.9 | 42.9 | 75.6 | 4.1 | 25.1 | 0.14 | 0.79 | 0.25 | 2.1 | 32.5 | 0.23 | 0.01 |
| 651555 | 101.8 | 83.1 | 92.7 | 4.0 | 24.6 | 0.21 | 0.73 | 0.19 | 11.8 | 34.0 | 1.75 | 0.06 |
| 651587 | 93.9 | 93.7 | 94.3 | 4.0 | 22.4 | 0.13 | 0.81 | 0.22 | 8.4 | 76.2 | 5.10 | 0.07 |
| 651987 | 83.1 | 67.0 | 77.9 | 3.9 | 27.6 | 0.23 | 0.81 | 0.21 | 4.8 | 59.3 | 0.96 | 0.02 |
| 695785 | 100.4 | 72.2 | 107.1 | 4.1 | 24.6 | 0.11 | 0.81 | 0.20 | 6.6 | 42.9 | 0.51 | 0.01 |
| 695823 | 97.1 | 68.5 | 67.9 | 4.2 | 23.9 | 0.14 | 0.85 | 0.23 | 4.2 | 33.6 | 0.12 | 0.00 |
| 695980 | 85.9 | 60.2 | 63.8 | 4.0 | 27.2 | 0.19 | 0.84 | 0.26 | 4.4 | 37.4 | 0.17 | 0.01 |
| 695995 | 93.4 | 47.8 | 82.5 | 4.1 | 28.2 | 0.28 | 0.90 | 0.25 | 3.5 | 44.2 | 0.09 | 0.00 |

### Complement C3 Levels

[0442] C3 levels were measured on several days during the study period prior to dosing and on Day 42 (pre- and post-dosing). When compared on Day 42 pre-dose to concurrent control (saline) and baseline (Day −14 pre-dose), a decreasing trend was noted in all antisense oligonucleotide-treated groups except animals treated with ISIS No. 651555. The lowest C3 level (82% of Day 42 pre-dose baseline value) was shown in animals treated with ISIS No. 651987 on Day 42 compared to pre-dose. The results of the complement C3 analysis are shown in the Table below.

TABLE 88
C3 Analysis on Day 42 as compared to
baseline and control groups (mg/dL)

| | | | | % decrease |
|---|---|---|---|---|
| | | | | compared to |
| | | | % decrease compared | control group |
| ISIS | Day −14 | Day 42 | to baseline | (pre-dose |
| No. | (pre-dose) | (pre-dose) | (pre-dose on Day −14) | on Day 42) |
| Saline | 110 | 103 | −7 | 0 |
| 651530 | 94 | 81 | −14 | −21 |
| 651555 | 108 | 110 | +2 | +7 |
| 651587 | 105 | 93 | −12 | −9 |
| 651987 | 109 | 89 | −18 | −13 |
| 695785 | 112 | 101 | −10 | −2 |
| 695823 | 105 | 98 | −7 | −4 |
| 695980 | 91 | 86 | −6 | −16 |
| 695995 | 108 | 95 | −12 | −7 |

[0443] Decreased C3 levels (approximately decreased by 6 to 18% compared to baseline control) were observed in all oligonucleotide-treated groups except animals treated with ISIS No. 651555. The lowest C3 level was shown in animals treated with ISIS No. 651987.

TABLE 89
Concentrations of ISIS antisense oligonucleotide
in liver and lung in cynomolgus monkeys

| | | |
|---|---|---|
| Study | Concentration | Liver/lung |

| ISIS No. | day | Liver (μg/g) | Lung (μg/g) | ratio |
|---|---|---|---|---|
| 695785 | 44 | 658 | 69 | 9.6 |
| 695823 | 45 | 339 | 29 | 11.7 |
| 695995 | 45 | 556 | 38 | 14.5 |

TABLE 90
K-Ras concentrations in liver and kidney cortex in
cynomolgus monkeys following 6 weeks of dosing

| | | | Kidney/liver |
|---|---|---|---|
| ISIS No. | Liver | Kidney | ratio |
| 651530 | 416 | 1012 | 2.4 |
| 651555 | 467 | 1127 | 2.4 |
| 651587 | 318 | 1070 | 3.4 |
| 651987 | 310 | 832 | 2.7 |
| 695785 | 587 | 1719 | 2.9 |
| 695823 | 519 | 2748 | 5.3 |
| 695980 | 601 | 2807 | 4.7 |
| 695995 | 464 | 1325 | 2.9 |

[0444] In conclusion, subcutaneous injection of eight antisense oligonucleotides targeting K-Ras mRNA for 6 weeks was well tolerated with no overt toxicity. No treatment-related changes in mortality, body weight, coagulation and urinalysis/urine chemistry were observed in this study.

### Example 22: Tolerability of Antisense Oligonucleotides Targeting K-Ras in Cynomolgus Monkeys

[0445] Six antisense oligonucleotides were compared for their relative efficacy, tolerability, pharmacokinetic and pharmacodynamic profiles in a repeated-dose study of male cynomolgus monkeys following six weeks of treatment by subcutaneous administration. These antisense oligonucleotides used in the study are described in the table below.

TABLE 91

| | | | SEQ |
|---|---|---|---|
| | | | ID |
| Isis No. | Sequence | Chemistry | NO. |
| 696018 | CTCTTGATTTGTCAGC | kkk-10-kkk | 678 |
| 696044 | GTGTTTATGCAATGTT | kkk-10-kkk | 715 |
| 716600 | CCATTTATGTGACTAG | kkk-10-kkk | 790 |
| 716655 | TGTTTATGCAATGTTA | kkk-10-kkk | 854 |
| 740233 | GTGTTTATGCAATGTT | kkk-8-kdkdk | 2158 |
| 746275 | TCTTGATTTGTCAGCA | kk-10-keke | 804 |

### Treatment

[0446] Prior to the study, the monkeys were kept in quarantine during which the animals were observed daily for general health. The monkeys were two to three years old and weighed two to three kg. Observations were recorded for all animals once daily during the acclimation and pre-treatment period, twice daily (before and after dosing on the day of dosing, in the morning and afternoon on non-dosing day) during the treatment period, and prior to the necropsy.

[0447] All study animals were weighed once prior to group assignment during the acclimation period and once weekly during the treatment period. Body weights were taken prior to the necropsy on the day of scheduled sacrifice. Blood samples were collected from the cephalic or femoral vein for evaluation of hematology, coagulation, and clinical chemistry. Fresh urine samples were collected from all available animals for urinalysis/urine chemistry parameters Animals were fasted overnight prior to blood collection for clinical chemistry and urine collection.

[0448] At the end of the study, the monkeys were sacrificed, necropsied and organs removed. The protocols described in the Example were approved by the Institutional Animal Care and Use Committee (IACUC).

[0449] Twenty-eight male cynomolgus monkeys were divided into seven groups of four monkeys each, with one group treated with 0.9% saline as a negative control. The six antisense oligonucleotides were subcutaneously administered 40 mg/kg every other day for the first week (Days 1, 3, 5 and 7) for a total of four loading doses, and once a week thereafter (days 14, 21, 28, 35, and 4) for 6 weeks. Several clinical endpoints were measured over the course of the study. Tail bleeds were conducted at 2 weeks and 1 week prior to the first subcutaneous administration, then again at days 16, 30, and 44. Serum was tested at 2 weeks prior to the first subcutaneous administration and at day 42 and urine was collected at 1 week prior to study start and at day 44.

### Body and Organ Weights

[0450] Body weight was assessed weekly. Body weights at some of these time points and organ weights (at day 44) are presented in the Table below. No remarkable effects of the antisense oligonucleotides on body weight were observed.

TABLE 92
Body weights of cynomolgus monkeys treated with antisense oligonucleotides

| | Body (g) | | | | | | | |
|---|---|---|---|---|---|---|---|---|
| Isis No. | day 1 | day 7 | day 14 | day 21 | day 28 | day 35 | day 42 | day 44 |
| PBS | 2512.5 | 2630.8 | 2536.0 | 2542.5 | 2606.3 | 2565.8 | 2557.8 | 2,614.5 |
| 696018 | 2478.0 | 2596.8 | 2537.3 | 2527.5 | 2586.0 | 2539.3 | 2534.0 | 2,596.8 |
| 696044 | 2507.0 | 2624.5 | 2574.5 | 2607.0 | 2656.0 | 2610.3 | 2589.5 | 2,630.0 |
| 716600 | 2458.5 | 2537.5 | 2496.0 | 2503.8 | 2560.8 | 2526.5 | 2528.5 | 2,543.8 |
| 716655 | 2454.3 | 2506.8 | 2470.8 | 2508.8 | 2569.5 | 2520.8 | 2551.8 | 2,599.8 |
| 740233 | 2522.5 | 2554.3 | 2501.0 | 2545.5 | 2591.5 | 2540.5 | 2541.8 | 2,601.0 |
| 746275 | 2365.5 | 2411.0 | 2374.5 | 2408.5 | 2469.3 | 2419.5 | 2410.8 | 2,421.8 |

TABLE 93
Organ weights of cynomolgus monkeys treated with antisense oligonucleotides

| | Organ (g) | | | | | | | |
|---|---|---|---|---|---|---|---|---|
| | | | | mandibular | mesenteric | | | |
| | | | | lymph | lymph | | | |
| Isis No. | heart | kidney | liver | node | node | spleen | testes | thymus |
| PBS | 8.89 | 14.10 | 58.39 | 0.29 | 1.03 | 2.62 | 0.80 | 2.20 |
| 696018 | 10.06 | 13.72 | 67.02 | 0.51 | 2.67 | 4.03 | 1.20 | 0.68 |
| 696044 | 9.25 | 17.02 | 77.61 | 0.57 | 2.82 | 6.23 | 1.46 | 1.24 |
| 716600 | 8.96 | 13.34 | 69.54 | 0.43 | 2.43 | 3.20 | 1.29 | 2.38 |
| 716655 | 8.67 | 14.85 | 69.76 | 0.48 | 2.05 | 3.45 | 1.32 | 1.04 |
| 740233 | 10.05 | 15.86 | 79.39 | 0.79 | 3.13 | 6.23 | 1.07 | 1.33 |
| 746275 | 8.40 | 12.96 | 65.13 | 0.87 | 4.10 | 5.14 | 0.94 | 1.12 |

### Hematology

[0451] To evaluate any effect of ISIS oligonucleotides in cynomolgus monkeys on hematologic parameters, blood samples of approximately 1.3 mL of blood were collected on day 44 from each of the study animals in tubes containing K₂-EDTA. Samples were analyzed for red blood cell (RBC) count, white blood cells (WBC) count, basophil count (BAS), as well as for platelet count (PLT) and mean platelet volume (MPV) using an ADVIA120 hematology analyzer (Bayer, USA). The data is presented in the Table below.

TABLE 94
Hematology

| | BAS | PLT | MPV | RBC | WBC |
|---|---|---|---|---|---|
| ISIS No. | 10³/uL | 10³/uL | fL | 10⁶/uL | 10³/uL |
| PBS | .043 | 379.3 | 8.00 | 5.51 | 14.04 |
| 696018 | .055 | 352.0 | 8.78 | 6.16 | 13.12 |
| 696044 | .048 | 293.0 | 8.75 | 5.23 | 10.23 |
| 716600 | .038 | 454.0 | 7.73 | 5.94 | 14.73 |
| 716655 | .030 | 408.0 | 6.88 | 6.04 | 11.47 |
| 740233 | .035 | 352.3 | 7.40 | 5.59 | 7.99 |
| 746275 | .043 | 352.8 | 7.13 | 5.53 | 9.24 |

[0452] The data indicate the oligonucleotides did not cause any significant changes in hematologic parameters outside the expected range for antisense oligonucleotides at this dose. These antisense oligonucleotides were well tolerated in terms of hematologic parameters in the monkeys.

### Liver and Kidney Function

[0453] To evaluate the effect of these antisense oligonucleotides on liver and kidney function, samples of blood, plasma, serum and urine were collected from all study groups on day 44. The blood samples were collected via femoral venipuncture, 48 hrs post-dosing. The monkeys were fasted overnight prior to blood collection. Approximately 1.5 mL of blood was collected from each animal into tubes without anticoagulant for serum separation. Levels of the various markers were measured using an automated clinical chemistry analyzer (Hitachi Olympus AU400e, Melville, N.Y.). Total urine protein and urine creatinine levels were measured, and the ratio of total urine protein to creatinine (P/C Ratio) was determined.

[0454] To evaluate the effect of the antisense oligonucleotides on hepatic function, plasma concentrations of transaminases (ALT, AST), Albumin (Alb) and total bilirubin (“T. Bil”) were measured. To evaluate the effect of the antisense oligonucleotides on kidney function, plasma concentrations of blood urea nitrogen (BUN) and creatinine (Cre) were measured. Urine levels of albumin (Alb), creatinine (Cre) and total urine protein (Micro Total Protein (MTP)) were measured, and the ratio of total urine protein to creatinine (P/C ratio) was determined.

[0455] To evaluate any inflammatory effect of the ISIS oligonucleotides in cynomolgus monkeys, C-reactive protein (CRP), which is synthesized in the liver and which serves as a marker of inflammation, was measured on day 42. For this, blood samples were taken from fasted monkeys, the tubes were kept at room temperature for a minimum of 90 min., and centrifuged at 3,000 rpm for 10 min at room temperature to obtain serum. The results are presented in the Tables below and indicate that most of the antisense oligonucleotides targeting human K-Ras were well tolerated in cynomolgus monkeys.

TABLE 95
Serum and urine clinical chemistry

| | Serum (day 44) | | | | | | | | Urine (day 42) | | |
|---|---|---|---|---|---|---|---|---|---|---|---|
| ISIS | C3 | ALT | AST | Alb | BUN | CRP | Cre | T.bil | Alb | Cre | P/C |
| No. | mg/dL | U/L | U/L | g/dL | mg/dL | mg/L | mg/dL | mg/dL | g/dL | mg/dL | ratio |
| PBS | 125.5 | 45.5 | 74.0 | 4.3 | 27.1 | .158 | .718 | .206 | .150 | 35.31 | .000 |
| 696018 | 114.5 | 79.2 | 95.1 | 3.9 | 34.1 | .278 | .988 | .157 | 3.000 | 42.10 | .175 |
| 696044 | 105.1 | 39.2 | 96.9 | 3.7 | 29.1 | .435 | .795 | .235 | 1.075 | 36.83 | .120 |
| 716600 | 92.0 | 72.0 | 130.7 | 3.9 | 33.9 | .190 | .903 | .192 | .450 | 39.47 | .018 |
| 716655 | 89.5 | 63.5 | 76.5 | 3.7 | 27.0 | .153 | .753 | .189 | .225 | 36.03 | .003 |
| 740233 | 90.6 | 58.9 | 101.8 | 3.7 | 24.2 | .283 | .668 | .190 | .125 | 34.68 | .000 |
| 746275 | 85.4 | 46.2 | 82.9 | 3.5 | 25.3 | .428 | .795 | .184 | 1.600 | 46.52 | .073 |

### RNA Analysis

[0456] At the end of the study, RNA was extracted from various monkey tissues for real-time PCR analysis of measurement of mRNA expression of K-Ras for the animals treated with ISIS 746275. As above, primer probe set RTS3496_MGB was used, and the results for each group were averaged and presented as percent inhibition of mRNA, relative to the PBS control, normalized with rhesus cyclophilin A.

TABLE 96
Inhibition of K-Ras mRNA relative to the PBS control in
various monkey tissues after treatment with ISIS 746275

| Tissue | % Inhibition |
|---|---|
| Liver | 69 |
| Kidney | 51 |
| Lung | 27 |
| Duodenum | 39 |
| Pancreas | 0 |
| Heart | 28 |

What is claimed:

1. A compound comprising a modified oligonucleotide consisting of 8 to 80 linked nucleosides and having a nucleobase sequence comprising at least 8, 9, 10, 11, or 12 contiguous nucleobases of any of the nucleobase sequences of SEQ ID NOs: 13-2190.

2. A compound comprising a modified oligonucleotide consisting of 8 to 80 linked nucleosides and having a nucleobase sequence comprising the nucleobase sequence of any one of SEQ ID NOs: 13-2190.

3. A compound comprising a modified oligonucleotide consisting of the nucleobase sequence of any one of SEQ ID NOs: 13-2190.

4. A compound comprising a modified oligonucleotide consisting of 8 to 80 linked nucleosides complementary within nucleobases 463-478, 877-892, 1129-1144, 1313-1328, 1447-1462, 1686-1701, 1690-1705, 1778-1793, 1915-1930, 1919-1934, 1920-1935, 2114-2129, 2115-2130, 2461-2476, 2462-2477, 2463-2478, 4035-4050 of SEQ ID NO: 1, wherein said modified oligonucleotide is at least 85%, 90%, 95%, or 100% complementary to SEQ ID NO: 1.

5. A compound comprising a modified oligonucleotide consisting of 8 to 80 linked nucleosides having a nucleobase sequence comprising at least 8, 9, 10, 11, or 12 contiguous nucleobases of any of the nucleobase sequences of any one of SEQ ID NOs: 272, 804, 239, 569, 607, 615, 621, 640, 655, 678, 715, 790, 854, 1028, 2130, 2136, 2142, 2154, and 2158.

6. A compound comprising a modified oligonucleotide consisting of 16 to 80 linked nucleosides having a nucleobase sequence comprising the nucleobase sequences of any one of SEQ ID NOs: 272, 804, 239, 569, 607, 615, 621, 640, 655, 678, 715, 790, 854, 1028, 2130, 2136, 2142, 2154, and 2158.

7. A compound comprising a modified oligonucleotide consisting of 16 linked nucleosides having a nucleobase sequence consisting of any one of SEQ ID NOs: 272, 804, 239, 569, 607, 615, 621, 640, 655, 678, 715, 790, 854, 1028, 2130, 2136, 2142, 2154, and 2158.

8. The compound of any one of claims 1-7, wherein the modified oligonucleotide comprises:
a gap segment consisting of linked deoxynucleosides;
a 5′ wing segment consisting of linked nucleosides; and
a 3′ wing segment consisting of linked nucleosides;
wherein the gap segment is positioned between the 5′ wing segment and the 3′ wing segment and wherein each nucleoside of each wing segment comprises a modified sugar.

9. A compound comprising a modified oligonucleotide consisting of 16 to 80 linked nucleosides having a nucleobase sequence comprising the nucleobase sequence of any one of SEQ ID NOs: 272, 239, 569, 607, 615, 621, 640, 655, 678, 715, 790, and 854, wherein the modified oligonucleotide comprises:
a gap segment consisting of ten linked deoxynucleosides;
a 5′ wing segment consisting of three linked nucleosides; and
a 3′ wing segment consisting of three linked nucleosides;
wherein the gap segment is positioned between the 5′ wing segment and the 3′ wing segment, wherein each nucleoside of each wing segment comprises a constrained ethyl (cEt) nucleoside; wherein each internucleoside linkage is a phosphorothioate linkage and wherein each cytosine is a 5-methylcytosine.

10. A compound comprising a modified oligonucleotide consisting of 16 to 80 linked nucleosides having a nucleobase sequence comprising the nucleobase sequence of SEQ ID NO: 2130, wherein the modified oligonucleotide comprises:
a gap segment consisting of nine linked deoxynucleosides;
a 5′ wing segment consisting of one linked nucleoside; and
a 3′ wing segment consisting of six linked nucleosides;
wherein the gap segment is positioned between the 5′ wing segment and the 3′ wing segment; wherein the 5′ wing segment comprises a cEt nucleoside; wherein the 3′ wing segment comprises a cEt nucleoside, a 2′-O-methoxyethyl nucleoside, a cEt nucleoside, a 2′-O-methoxyethyl nucleoside, a cEt nucleoside, and 2′-O-methoxyethyl nucleoside in the 5′ to 3′ direction; wherein each internucleoside linkage is a phosphorothioate linkage; and wherein each cytosine is a 5-methylcytosine.

11. A compound comprising a modified oligonucleotide consisting of 16 to 80 linked nucleosides having a nucleobase sequence comprising the nucleobase sequence of any one of SEQ ID NOs: 804, 1028, and 2136, wherein the modified oligonucleotide comprises:
a gap segment consisting of ten linked deoxynucleosides;
a 5′ wing segment consisting of two linked nucleosides; and
a 3′ wing segment consisting of four linked nucleosides;
wherein the gap segment is positioned between the 5′ wing segment and the 3′ wing segment; wherein the 5′ wing segment comprises a cEt nucleoside and a cEt nucleoside in the 5′ to 3′ direction; wherein the 3′ wing segment comprises a cEt nucleoside, a 2′-O-methoxyethyl nucleoside, a cEt nucleoside, and a 2′-O-methoxyethyl nucleoside in the 5′ to 3′ direction; wherein each internucleoside linkage is a phosphorothioate linkage; and wherein each cytosine is a 5-methylcytosine.

12. A compound comprising a modified oligonucleotide consisting of 16 to 80 linked nucleosides having a nucleobase sequence comprising the nucleobase sequence of SEQ ID NO: 2142, wherein the modified oligonucleotide comprises:
a gap segment consisting of eight linked deoxynucleosides;
a 5′ wing segment consisting of two linked nucleosides; and
a 3′ wing segment consisting of six linked nucleosides;
wherein the gap segment is positioned between the 5′ wing segment and the 3′ wing segment; wherein the 5′ wing segment comprises a cEt nucleoside and a cEt nucleoside in the 5′ to 3′ direction; wherein the 3′ wing segment comprises a cEt nucleoside, a 2′-O-methoxyethyl nucleoside, a cEt nucleoside, a 2′-O-methoxyethyl nucleoside, a cEt nucleoside, and a cEt nucleoside in the 5′ to 3′ direction; wherein each internucleoside linkage is a phosphorothioate linkage; and wherein each cytosine is a 5-methylcytosine.

13. A compound comprising a modified oligonucleotide consisting of 16 to 80 linked nucleosides having a nucleobase sequence comprising the nucleobase sequence of SEQ ID NO: 2154, wherein the modified oligonucleotide comprises:
a gap segment consisting of nine linked deoxynucleosides;
a 5′ wing segment consisting of two linked nucleosides; and
a 3′ wing segment consisting of five linked nucleosides;
wherein the gap segment is positioned between the 5′ wing segment and the 3′ wing segment; wherein the 5′ wing segment comprises a cEt nucleoside and a cEt nucleoside in the 5′ to 3′ direction; wherein the 3′ wing segment comprises a cEt nucleoside, a 2′-O-methoxyethyl nucleoside, a cEt nucleoside, a 2′-O-methoxyethyl nucleoside, and a cEt nucleoside in the 5′ to 3′ direction; wherein each internucleoside linkage is a phosphorothioate linkage; and wherein each cytosine is a 5-methylcytosine.

14. A compound comprising a modified oligonucleotide consisting of 16 to 80 linked nucleosides having a nucleobase sequence comprising the nucleobase sequence of SEQ ID NO: 2158, wherein the modified oligonucleotide comprises:
a gap segment consisting of eight linked deoxynucleosides;
a 5′ wing segment consisting of three linked nucleosides; and
a 3′ wing segment consisting of five linked nucleosides;
wherein the gap segment is positioned between the 5′ wing segment and the 3′ wing segment; wherein the 5′ wing segment comprises a cEt nucleoside, a cEt nucleoside, and a cEt nucleoside in the 5′ to 3′ direction; wherein the 3′ wing segment comprises a cEt nucleoside, a deoxynucleoside, a cEt nucleoside, a deoxynucleoside, and a cEt nucleoside in the 5′ to 3′ direction; wherein each internucleoside linkage is a phosphorothioate linkage; and wherein each cytosine is a 5-methylcytosine.

15. The compound of any one of claims 1-14, wherein the oligonucleotide is at least 80%, 85%, 90%, 95% or 100% complementary to SEQ ID NO: 1 or 2.

16. The compound of any one of claims 1-15, wherein the modified oligonucleotide comprises at least one modified internucleoside linkage, at least one modified sugar, or at least one modified nucleobase.

17. The compound of claim 16, wherein the modified internucleoside linkage is a phosphorothioate internucleoside linkage.

18. The compound of claim 16 or 17, wherein the modified sugar is a bicyclic sugar.

19. The compound of claim 18, wherein the bicyclic sugar is selected from the group consisting of: 4′-(CH₂)—O-2′ (LNA); 4′-(CH₂)₂-O-2′ (ENA); and 4′-CH(CH₃)—O-2′ (cEt).

20. The compound of any one of claims 16-19, wherein the modified sugar is 2′-O-methoxyethyl.

21. The compound of any one of claims 16-20, wherein the modified nucleobase is a 5-methylcytosine.

22. The compound of any one of claims 1-21, wherein the modified oligonucleotide comprises:
a gap segment consisting of linked deoxynucleosides;
a 5′ wing segment consisting of linked nucleosides; and
a 3′ wing segment consisting of linked nucleosides;
wherein the gap segment is positioned immediately adjacent to and between the 5′ wing segment and the 3′ wing segment and wherein each nucleoside of each wing segment comprises a modified sugar.

23. The compound of any one of claims 1-22, wherein the compound is single-stranded.

24. The compound of any one of claims 1-23, wherein the compound is double-stranded.

25. The compound of any one of claims 1-24, wherein the compound comprises ribonucleotides.

26. The compound of claim 25, wherein the compound comprises a double-stranded RNA oligonucleotide, wherein one strand of the double-stranded RNA oligonucleotide is the modified oligonucleotide.

27. The compound of any one of claims 1-24, wherein the compound comprises deoxyribonucleotides.

28. The compound of any one of claims 1-27, wherein the modified oligonucleotide consists of 10 to 30, 12 to 30, 15 to 30, 16 to 30, or 16 linked nucleosides.

29. The compound of any one of claims 1-28, wherein the compound comprises a conjugate and the modified oligonucleotide.

30. The compound of any one of claims 1-28, wherein the compound consists of a conjugate and the modified oligonucleotide.

31. The compound of any one of claims 1-28, wherein the compound consists of the modified oligonucleotide.

32. A compound consisting of a pharmaceutically acceptable salt of any of the compounds of claims 1-31.

33. The compound of claim 32, wherein the pharmaceutically acceptable salt is a sodium salt.

34. The compound of claim 32, wherein the pharmaceutically acceptable salt is a potassium salt.

35. A compound comprising ISIS 651987, or a pharmaceutically acceptable salt thereof, having the formula:

[chemical structure]

36. A compound consisting of ISIS 651987, or a pharmaceutically acceptable salt thereof, having the formula:

[chemical structure]

37. The compound of claim 35 or 36, wherein the pharmaceutically acceptable salt is a sodium salt.

38. A composition comprising the compound of any one of claims 1-37 and a pharmaceutically acceptable carrier.

39. A method of treating, preventing, or ameliorating cancer in an individual comprising administering to the individual the compound of any one of claims 1-37 or composition of claim 38, thereby treating, preventing, or ameliorating cancer in the individual.

40. The method of claim 39, wherein the cancer is lung cancer, non-small cell lung carcinoma (NSCLC), small-cell lung carcinoma (SCLC)), gastrointestinal cancer, large intestinal cancer, small intestinal cancer, colon cancer, colorectal cancer, bladder cancer, liver cancer, stomach cancer, esophageal cancer, pancreatic cancer, biliary tract cancer, breast cancer, ovarian cancer, endometrial cancer, cervical cancer, prostate cancer, hematopoetic cancer, brain cancer, glioblastoma, malignant peripheral nerve sheath tumor (MPNST), neurofibromatosis type 1 (NF1) mutant MPNST, neurofibroma, leukemia, myeloid leukemia, or lymphoma.

41. The method of claim 39 or 40, wherein administering the compound reduces the number of cancer cells in the individual, reduces the size of a tumor in the individual, reduces or inhibits growth or proliferation of a tumor in the individual, prevents metastasis or reduces the extent of metastasis in the individual, or extends survival of the individual.

42. A method of inhibiting expression of KRAS in a cell comprising contacting the cell with the compound of any one of claims 1-37 or composition of claim 38, thereby inhibiting expression of KRAS in the cell.

43. Use of the compound of any one of claims 1-37 or composition of claim 38 for treating, preventing, or ameliorating cancer in an individual.

44. Use of the compound of any one of claims 1-37 or composition of claim 38 for the manufacture of a medicament for treating cancer.

45. The use of claim 43 or 44, wherein the cancer is lung cancer, non-small cell lung carcinoma (NSCLC), small-cell lung carcinoma (SCLC)), gastrointestinal cancer, large intestinal cancer, small intestinal cancer, colon cancer, colorectal cancer, bladder cancer, liver cancer, stomach cancer, esophageal cancer, pancreatic cancer, biliary tract cancer, breast cancer, ovarian cancer, endometrial cancer, cervical cancer, prostate cancer, hematopoetic cancer, brain cancer, glioblastoma, malignant peripheral nerve sheath tumor (MPNST), neurofibromatosis type 1 (NF1) mutant MPNST, neurofibroma, leukemia, myeloid leukemia, or lymphoma.

The application's sequence listing, which the Patent Office published only in electronic form, follows.

SEQUENCE LISTING (2194 sequences)

SEQ ID NO: 1 - DNA, 5765 bp, Homo sapiens
tcctaggcggcggccgcggcggcggaggcagcagcggcggcggcagtggcggcggcgaaggtggcggcggctcggccagtactcccggcccccgccatttcggactgggagcgagcgcggcgcaggcactgaaggcggcggcggggccagaggctcagcggctcccaggtgcgggagagaggcctgctgaaaatgactgaatataaacttgtggtagttggagctggtggcgtaggcaagagtgccttgacgatacagctaattcagaatcattttgtggacgaatatgatccaacaatagaggattcctacaggaagcaagtagtaattgatggagaaacctgtctcttggatattctcgacacagcaggtcaagaggagtacagtgcaatgagggaccagtacatgaggactggggagggctttctttgtgtatttgccataaataatactaaatcatttgaagatattcaccattatagagaacaaattaaaagagttaaggactctgaagatgtacctatggtcctagtaggaaataaatgtgatttgccttctagaacagtagacacaaaacaggctcaggacttagcaagaagttatggaattccttttattgaaacatcagcaaagacaagacagggtgttgatgatgccttctatacattagttcgagaaattcgaaaacataaagaaaagatgagcaaagatggtaaaaagaagaaaaagaagtcaaagacaaagtgtgtaattatgtaaatacaatttgtacttttttcttaaggcatactagtacaagtggtaatttttgtacattacactaaattattagcatttgttttagcattacctaatttttttcctgctccatgcagactgttagcttttaccttaaatgcttattttaaaatgacagtggaagtttttttttcctctaagtgccagtattcccagagttttggtttttgaactagcaatgcctgtgaaaaagaaactgaatacctaagatttctgtcttggggtttttggtgcatgcagttgattacttcttatttttcttaccaattgtgaatgttggtgtgaaacaaattaatgaagcttttgaatcatccctattctgtgttttatctagtcacataaatggattaattactaatttcagttgagaccttctaattggtttttactgaaacattgagggaacacaaatttatgggcttcctgatgatgattcttctaggcatcatgtcctatagtttgtcatccctgatgaatgtaaagttacactgttcacaaaggttttgtctcctttccactgctattagtcatggtcactctccccaaaatattatattttttctataaaaagaaaaaaatggaaaaaaattacaaggcaatggaaactattataaggccatttccttttcacattagataaattactataaagactcctaatagcttttcctgttaaggcagacccagtatgaaatggggattattatagcaaccattttggggctatatttacatgctactaaatttttataataattgaaaagattttaacaagtataaaaaattctcataggaattaaatgtagtctccctgtgtcagactgctctttcatagtataactttaaatcttttcttcaacttgagtctttgaagatagttttaattctgcttgtgacattaaaagattatttgggccagttatagcttattaggtgttgaagagaccaaggttgcaaggccaggccctgtgtgaacctttgagctttcatagagagtttcacagcatggactgtgtccccacggtcatccagtgttgtcatgcattggttagtcaaaatggggagggactagggcagtttggatagctcaacaagatacaatctcactctgtggtggtcctgctgacaaatcaagagcattgcttttgtttcttaagaaaacaaactcttttttaaaaattacttttaaatattaactcaaaagttgagattttggggtggtggtgtgccaagacattaattttttttttaaacaatgaagtgaaaaagttttacaatctctaggtttggctagttctcttaacactggttaaattaacattgcataaacacttttcaagtctgatccatatttaataatgctttaaaataaaaataaaaacaatccttttgataaatttaaaatgttacttattttaaaataaatgaagtgagatggcatggtgaggtgaaagtatcactggactaggaagaaggtgacttaggttctagataggtgtcttttaggactctgattttgaggacatcacttactatccatttcttcatgttaaaagaagtcatctcaaactcttagttttttttttttacaactatgtaatttatattccatttacataaggatacacttatttgtcaagctcagcacaatctgtaaatttttaacctatgttacaccatcttcagtgccagtcttgggcaaaattgtgcaagaggtgaagtttatatttgaatatccattctcgttttaggactcttcttccatattagtgtcatcttgcctccctaccttccacatgccccatgacttgatgcagttttaatacttgtaattcccctaaccataagatttactgctgctgtggatatctccatgaagttttcccactgagtcacatcagaaatgccctacatcttatttcctcagggctcaagagaatctgacagataccataaagggatttgacctaatcactaattttcaggtggtggctgatgctttgaacatctctttgctgcccaatccattagcgacagtaggatttttcaaacctggtatgaatagacagaaccctatccagtggaaggagaatttaataaagatagtgctgaaagaattccttaggtaatctataactaggactactcctggtaacagtaatacattccattgttttagtaaccagaaatcttcatgcaatgaaaaatactttaattcatgaagcttactttttttttttggtgtcagagtctcgctcttgtcacccaggctggaatgcagtggcgccatctcagctcactgcaacctccatctcccaggttcaagcgattctcgtgcctcggcctcctgagtagctgggattacaggcgtgtgccactacactcaactaatttttgtatttttaggagagacggggtttcaccctgttggccaggctggtctcgaactcctgacctcaagtgattcacccaccttggcctcataaacctgttttgcagaactcatttattcagcaaatatttattgagtgcctaccagatgccagtcaccgcacaaggcactgggtatatggtatccccaaacaagagacataatcccggtccttaggtagtgctagtgtggtctgtaatatcttactaaggcctttggtatacgacccagagataacacgatgcgtattttagttttgcaaagaaggggtttggtctctgtgccagctctataattgttttgctacgattccactgaaactcttcgatcaagctactttatgtaaatcacttcattgttttaaaggaataaacttgattatattgtttttttatttggcataactgtgattcttttaggacaattactgtacacattaaggtgtatgtcagatattcatattgacccaaatgtgtaatattccagttttctctgcataagtaattaaaatatacttaaaaattaatagttttatctgggtacaaataaacaggtgcctgaactagttcacagacaaggaaacttctatgtaaaaatcactatgatttctgaattgctatgtgaaactacagatctttggaacactgtttaggtagggtgttaagacttacacagtacctcgtttctacacagagaaagaaatggccatacttcaggaactgcagtgcttatgaggggatatttaggcctcttgaatttttgatgtagatgggcatttttttaaggtagtggttaattacctttatgtgaactttgaatggtttaacaaaagatttgtttttgtagagattttaaagggggagaattctagaaataaatgttacctaattattacagccttaaagacaaaaatccttgttgaagtttttttaaaaaaagctaaattacatagacttaggcattaacatgtttgtggaagaatatagcagacgtatattgtatcatttgagtgaatgttcccaagtaggcattctaggctctatttaactgagtcacactgcataggaatttagaacctaacttttataggttatcaaaactgttgtcaccattgcacaattttgtcctaatatatacatagaaactttgtggggcatgttaagttacagtttgcacaagttcatctcatttgtattccattgattttttttttcttctaaacattttttcttcaaacagtatataactttttttaggggatttttttttagacagcaaaaactatctgaagatttccatttgtcaaaaagtaatgatttcttgataattgtgtagtaatgttttttagaacccagcagttaccttaaagctgaatttatatttagtaacttctgtgttaatactggatagcatgaattctgcattgagaaactgaatagctgtcataaaatgaaactttctttctaaagaaagatactcacatgagttcttgaagaatagtcataactagattaagatctgtgttttagtttaatagtttgaagtgcctgtttgggataatgataggtaatttagatgaatttaggggaaaaaaaagttatctgcagatatgttgagggcccatctctccccccacacccccacagagctaactgggttacagtgttttatccgaaagtttccaattccactgtcttgtgttttcatgttgaaaatacttttgcatttttcctttgagtgccaatttcttactagtactatttcttaatgtaacatgtttacctggaatgtattttaactatttttgtatagtgtaaactgaaacatgcacattttgtacattgtgctttcttttgtgggacatatgcagtgtgatccagttgttttccatcatttggttgcgctgacctaggaatgttggtcatatcaaacattaaaaatgaccactcttttaattgaaattaacttttaaatgtttataggagtatgtgctgtgaagtgatctaaaatttgtaatatttttgtcatgaactgtactactcctaattattgtaatgtaataaaaatagttacagtgactatgagtgtgtatttattcatgaaatttgaactgtttgccccgaaatggatatggaatactttataagccatagacactatagtataccagtgaatcttttatgcagcttgttagaagtatcctttatttctaaaaggtgctgtggatattatgtaaaggcgtgtttgcttaaacttaaaaccatatttagaagtagatgcaaaacaaatctgcctttatgacaaaaaaataggataacattatttatttatttccttttatcaaagaaggtaattgatacacaacaggtgacttggttttaggcccaaaggtagcagcagcaacattaataatggaaataattgaatagttagttatgtatgttaatgccagtcaccagcaggctatttcaaggtcagaagtaatgactccatacatattatttatttctataactacatttaaatcattaccagg

SEQ ID NO: 2 - DNA, 50001 bp, Homo sapiens
cctttttgtgtcagagactgtcttaggtgctggaaatttagcagtaaatgaaacagaccaaaacccatgccctcatggagcttacattctgatggtagagagacaagaaaacaaaatagatagtgtattattgaaggtgatgagagctctggagaaaaagtaggaaaagagacagatctgggacaagggcgaaattacagtatcaaagatgatctttttagggaagatctccttttaaaaacactttggaacaaagatttaaatgaggtgccagaggggtagcaagtgcatattccctgaggaagacgcctgcctggcattttcaaggaacagccagtaaccaatgtttatctacgtaagtaaggaagggagaacagtaggatgagagttcagagaagagggtaggggatatcaaataatttaaggccatgtaggatttttgagaagaattttgcttttatgtcaagtggaatgagggccactgatgatctgggagtagagtgactatgatccgacatgaagtatactccattttttaactatgtgaacttgtgccaacgttttaacctctaaatctgtttcgtcatttgtaaaacggtaaaaagtattttacctcataaggttgtcgtgatgattaaataagatgatacgataagtgcaaaagatttagcttgtacttaacatagagtaggcacattttctccccttccctgtctttcacttttctcttctgccccttccacctggcgctaggagggggagactggaataaaccttgcagattacagcccgtgtaagagtagaaaggaaaggatgacagttgatgtaaagccttggttaacagacataatagctgggatttaaattcagctttattggtggtttatgatgtggactagaggaatggaactgaaagtctcggaggaggggcgatcctatcaggtacaggcgctgcttttccagccctcaatcctcaagactctcccaagatacatttctaggtagtttatcaacacagactccgggtatgctagcatgtttaattgccccattgtttaatgtcttaactccacgaactttaactgattaatctgtcttctaattaatgtttgaatgactctcctcaggtctaaactaccaaggccatctctacttaaaaacagttgtcttttgtttgtgatttcaggggccctgggtataagcgaagtccctgtttagagaccttgtgatgggttcaaaatatcaagaaagatagcaaaatatcacaagcctcctgacccgagaagattagcgttgaaagggtctgtcgtgtttgtttgggcctggggctaaattcccagcccaagtgctgaggctgataataatcggggcggcgatcagacagccccggtgtgggaaatcgtccgcccggtctccctaagtccccgaagtcgcctcccacttttggtgactgcttgtttatttacatgcagtcaatgatagtaaatggatgcgcgccagtataggccgaccctgagggtggcggggtgctcttcgcagcttctctgtggagaccggtcagcggggcggcgtggccgctcgcggcgtctccctggtggcatccgcacagcccgccgcggtccggtcccgctccgggtcagaattggcggctgcggggacagccttgcggctaggcagggggcgggccgccgcgtgggtccggcagtccctcctcccgccaaggcgccgcccagacccgctctccagccggcccggctcgccaccctagaccgccccagccaccccttcctccgccggcccggcccccgctcctcccccgccggcccggcccggccccctccttctccccgccggcgctcgctgcctccccctcttccctcttcccacaccgccctcagccgctccctctcgtacgcccgtctgaagaagaatcgagcgcggaacgcatcgatagctctgccctctgcggccgcccggccccgaactcatcggtgtgctcggagctcgattttcctaggcggcggccgcggcggcggaggcagcagcggcggcggcagtggcggcggcgaaggtggcggcggctcggccagtactcccggcccccgccatttcggactgggagcgagcgcggcgcaggcactgaaggcggcggcggggccagaggctcagcggctcccaggtgcgggagagaggtacggagcggaccacccctcctgggcccctgcccgggtcccgaccctctttgccggcgccgggcggggccggcggcgagtgaatgaattaggggtccccggaggggcgggtggggggcgcgggcgcggggtcggggcgggctgggtgagaggggtctgcaggggggaggcgcgcggacgcggcggcgcggggagtgaggaatgggcggtgcggggctgaggagggtgaggctggaggcggtcgccgctggtgctgcttcctggacggggaaccccttccttcctcctccccgagagccgcggctggaggcttctggggagaaactcgggccgggccggctgcccctcggagcggtggggtgcggtggaggttactcccgcggcgccccggcctcccctccccctctccccgctcccgcacctcttgcctccctttccagcactcggctgcctcggtccagccttccctgctgcatttggcatctctaggacgaaggtataaacttctccctcgagcgcaggctggacggatagtggtccttttccgtgtgtaggggatgtgtgagtaagaggggaggtcacgttttggaagagcataggaaagtgcttagagaccactgtttgaggttattgtgtttggaaaaaaatgcatctgcctccgagttcctgaatgctcccctcccccatgtatgggctgtgacattgctgtggccacaaaggaggaggtggaggtagagatggtggaagaacaggtggccaacaccctacacgtagagcctgtgacctacagtgaaaaggaaaaagttaatcccagatggtctgttttgcttggtcaagttaaacccgaagaaaacccgcagagcagaagcaaggctttttccttgctagttgagtgtagacagcaatagcaaaaatagtacttgaagtttaatttacctgttcttgtcctttcccctatttcttatgtattaccctcatcccctcgtctcttttatactaccctcattttgcagatgtgttctacatctcaagagttattacagtactccaaaacagcacttacatgattttttaaacttacagaggaattgtagcaatccaccagctaaccgcctgaaatagacttaaacatgtgcatctcctttttttttttttttttgagacacagtctcgctctgttgcccaggctggagtgcaatggcgcggtatcggctcactgaaacctccgcctcctgggttcaagcaattctcctgcctcagcctcccgagtagctgggactagtaggtgcacgccaccatgcccagctaatttttgtatttttagtagagacagagtttcatcatgttggtcaggatggtctccatctgctctgttgcccaggctggagtgcagtggcgccgtctcggctcactgcaacctctgcctcctgcattcaagcaattctcctgcctcagcctcccgaataactgggattacaggtgtctgctgccatgcccggctaattttttgtatttttagtagagacgggggtttcaccatgttggtcaggctggtctagaactcctgacctcgtgatctgcccgcctcggcctcccacagtggcatgtgcatcttatagctgaagtctaagccttcttaaatcttgagatccatcaaaacagacaggttttctaattgttatacaatgtatatgttatgtttataatagaaatcattttacaaataagttataaatgggaaaggtctatttgtaattatcagctcagaattaaccataaaactggtgtcactgaagtgactgaggtccaaaatgctgactctgcatgttatagactacagatatcaaatatggttgctaacaatagtttactttgagactgtagccatccacagtatatttgcttttaagagatggtagatggtaattcagttttatgaaaaataaaaatgaattttcttccattacaaaattgttggattcgagtccagtccactccttactagcttttctaactctcggtgagggatcccctcccagcccatgatcttcatttggtaagactcctttggaacccagttctctctagtggatttaaatgtgatttggttttaaaaatctcattcaaggaattttttttttttctggaaacaaccaccgcataaacaagtaaaccggaagatacatgtggctctgaattcatatatatacacaaactctaatccaatgtctgtccacagtatttcctaggctagtaaactttttggccttaacgacccctctaccctctttgtttttttgagagagagagtctcactctgtcacccaggccggaatgcagtggcgcgatctcggcccgctactacctccgactctcaggctcaagcgattctcccgcctcagcttcccgagtagccgggattacaggctcccgccaccgggctaattgtatttttagatacgggatttcaccatgttggccaggctggtctcgacctcctgacctcaggtgatccgcccgcctaagcctcccaaagtgctgggattacaggccaccacacccggcctacactcttaaaaattatcgaaggggccgggcacattggctcttatctgtaatcccagcactttgggagactgaggcgggaggatcgcttgaggccaggagttggagaccagcgtactcaacatagtgagaccttgttataaagaaaaaaaaaatccaggattaaaaaaaatctttgatttgtttgggatttattaatatttaccgtattggaaattaaaacaattttttaaaatgtattcatttaaaaataataagcccattacttggtaacatgaataaaatattttatgaaaaataactattttccaaaacaaaaccaaaacttagaaaagtggtattgtttcacacttcagtaaatctctttaatgatgtggcttaatagaagatatggattcttatatctgcatctgcattcaatctattatgatcacacatctggaaaacttgtgaaagaatgggagttaaaagggtaaaggacatcttaatgttattatgaaaacagttttgacctcttgcacaccagaaaagtcttagtaacctgaggggttcctagaccacattttgagaactgttttaggctatgcaaactggttggggggaggttggggtaggcagagagctagaagatacattttagtgtaattctcctcatctattcctaattgctttggcctacatttgaaataaagcgtggaggcaaacgggataagatacatgtttgtagtggttgttaacttcaccctagacaagcagccaataagtctaggtagagcagagtaaggcggggaactatgccgtgaccgtgtgtgatacaatttttctagcctgtggtgctttttgcggcagggcttaggagtaaggttagtatgttatcatttgggaaaccaaattattattttgggtcttcagtcaattatgatgctgtgtatatttagtgtttatctacaatatatgcacattcattaatttggagctactcatcctataataaatagttgtgcatttactcccatttttttctgcatttctctccttatttataattatgtgttacatgagggaaaggaggtgaaattaaacattcatattatttcaaaaaatttgaaacaactaactaaaaaatatgttttattttctgtatggtgtttgttatacaatctgtcaatattcatgcacctcttgggagacagtgtatgaaaagcaaagagtaacagtcacatggattactgattactgagatatattcacttgcatctttttttttttttgagacggagtggctctgtcgcccaggctggagtgcagtggcgtgatctcggctcactgcaagctccgcctcctgggttcacgccattcttctgcctcagcctcccaagtagctgggactacaggcgcccgccaccacgcccggctaatttttttatatttttagtagagacggggtttcaccgggttagccaggatggtcttgatctcctgacctcgtgatccaccctcctcggcctcccaaagtgctaggattataggcgtgagccaccgtgcccggctcacttgcatctcttaacagctgttttcttactaaaaacagtgtttatctctaatctttttgtttgtttgtttgttttgagatggagtcttactccgtcacccaatctggagtgcagtggcgtgatctgggctcactgcaacctctgcctcccgggttcaagtgattctccttcctcagcctccccagtagctaggactacaggagagcgccaccacgcctgattaatttttgtatttttagtagagagagggtttcaccatattggccaggctggtcttgaactcctggcctcaggtgatccacccgccttggcctctgaaagtgctgggattacaggcatgagccgccgcacccggctttctaatctttatctttttttgtgcagcggtgatacaggattatgtattgtactgaacagttaattcggagttctcttggtttttagctttattttccccagagatttttttttttttttttttttttgagacggagtcttgctctatcgccaggctggagtgcagtggcgccatctcggctcattgcaacctcggactcctattttccccagagatatttcacacattaaaatgtcgtcaaatattgttcttctttgcctcagtgtttaaatttttatttccccatgacacaatccagctttatttgacactcattctctcaactctcatctgattcttactgttaatatttatccaagagaactactgccatgatgctttaaaagtttttctgtagctgttgcatattgacttctaacacttagaggtgggggtccactaggaaaactgtaacaataagagtggagatagctgtcagcaacttttgtgagggtgtgctacagggtgtagagcactgtgaagtctctacatgagtgaagtcatgatatgatcctttgagagcctttagccgccgcagaacagcagtctggctatttagatagaacaacttgattttaagataaaagaactgtctatgtagcatttatgcatttttcttaagcgtcgatggaggagtttgtaaatgaagtacagttcattacgatacacgtctgcagtcaactggaattttcatgattgaattttgtaaggtattttgaaataatttttcatataaaggtgagtttgtattaaaaggtactggtggagtatttgatagtgtattaaccttatgtgtgacatgttctaatatagtcacattttcattatttttattataaggcctgctgaaaatgactgaatataaacttgtggtagttggagctggtggcgtaggcaagagtgccttgacgatacagctaattcagaatcattttgtggacgaatatgatccaacaatagaggtaaatcttgttttaatatgcatattactggtgcaggaccattctttgatacagataaaggtttctctgaccattttcatgagtacttattacaagataattatgctgaaagttaagttatctgaaatgtaccttgggtttcaagttatatgtaaccattaatatgggaactttactttccttgggagtatgtcagggtccatgatgttcactctctgtgcattttgattggaagtgtatttcagagtttcgtgagagggtagaaatttgtatcctatctggacctaaaagacaatctttttattgtaacttttatttttatgggtttcttggtattgtgacatcatatgtaaaggttagatttaattgtactagtgaaatataattgtttgatggttgatttttttaaacttcatcagcagtattttcctatcttcttctcaacattagagaacctacaactaccggataaattttacaaaatgaattatttgcctaaggtgtggtttatataaaggtactattaccaactttacctttgctttgttgtcatttttaaatttactcaaggaaatactaggatttaaaaaaaaattccttgagtaaatttaaattgttatcatgtttttgaggattattttcagatttttttagtttaatgaaaatttaccaaagtaaagaccagcagcagaatgataagtaaagacctgtaagacaccttgaaggtcatggagtagaacttccatcccaagcagatgaggatttatttaatctcaaagacctccaggaggggacattccccaactgtccttgttaactcattttcagaacatatttattagcatattttacatgtaatttggatcttcatgttaaatttaacatcagtggagatggaaaataagcatatcgccttgtctttgaaatagccctatattgttagattgtttcttaggcttctttaccctgggttaagcagtcctaatactttagcatttattctacatctagtgtactaatttaaaaaaatcagttctgaaaaatttctaagaactttcttcaagttccaagctgtgaaatctagaacaggtcaaagtgccttattaacgtactgtactgtgtagtgtcttgaagagacactttgcgctgaggcaagttctgagggcattgggtggccttgggaagatatttatgcagtttagaacctggagaattgattagataactaatcataaggaaacgtcacatatttttggtactataaaaaagtggagaaataatgcctatttgcaaagatttgatttaaacatagaaacaactttatttggcttccaattttaagaatttacagcagtaaaggggaacagtctaattgaagtagactgcctatgcaatagtctctgtatatttacttttgacaagttaattcaatgtgtactatagttttgtttctttgaagaggtttgaatagtgcacccattttaatctgtattgcaaattcagggttacttggcagactctactatttaaatcagatgtaaaaggaagttttaatataattcactttatgcctgaaagttttcctgggattttggaaggtgattttactggaaatgctgtctgtcttccctgaaaatctgagaaattccattacactttgtttccaatcagaggtcatgagtgctatatgagtatatacagcatgacgtcatgaatgtgataaagtgggttaggaaaccttttgctaatgattgttaaaatgcaatataaatgttgaagaaataaagctaacagttaagcctttatttgggcggaaggctgaaaaagtttataaacttaaacctataactctgcttatgatttctgccaaaccagaagacttgactctgggaagcattggttacctgtgaactttgaaactgacggtccctgacgtagtttagtcacctgggaaaaggtatctgagattatctcttatctcccaagttacagtgagtctctgagggaactgacacattacattaagttcttggtgtagttaaactgtaagaaaggcaggagaacttagtagttaaatagttggttaaatggaaatgctgactccatgttattgtaaaaagttaaaaatttaggaggatatggggatttcactgccattgcaggttttgattggtatttaccaatccgtgtgggtcagagagaaaattagaaaggatatgactgcacattttggaattattagcagtttttctacatttaaaatggaaataaattttttaaaaatttaaatcaagtaatactgtattttttggtgatttagatttttcaaaatttacactaagagatagtaaggagggtggctattgtttctttcaataatgtctctgagaggttgtaactcatctaaggatacgtagctaataagtggtaggatttcaatttaaattctctgagaccaagttaagtagaatttgcactgtactcttgtataactttttaaaactgaaaattagctatctttcaaattaagaaaatatttactaatggagactaattcagatttgtaagtataccaaaatttgaacttagcctgctatctaatggcaacttagtggcagaggtatgatgtaaaatcattcaggtatgacacatagatggagtatgtttgtattcgaggctgtgcacataatcacctttacttgtattgtgaagtatatattgttatcttttatgaagcccactaaagagataatgaaatacctcgttattagggcaagattattgaaaactcaaaatagcccccaaacacaatacttggctagaaatatatacctttatagttcagagatcatttattatcaaaaccctgaagttttttttctaaggtaaaatttggtggaagaggaaaagtctcgttttaaaaaaatgtaggtagttacagagatcagaatgattagttgatcacttaccaaatatatattaagtatctactgtatataatatgctagtaagaataaatatagcaggaagtattttttcccaggctctaattgtttgacatcagcatgcttttattgtggcacttataattcagttcaagtattatgcccctctttgatggaacagtttcctattcagtaaggaagaccagattaatcattggattggtttgtttcatctttagtgttctgagctgtagagtatttatttaccaaggtttattttaatttttattttatttttatttttccatgttcattgtagaattcattttacctacgaatgaagtatgtagattatagagagaaaatttgtaaaattaaactgatactgaagactggtataagaaaagccttatgtaatttgtaagctgctattcttctgagtttatacatatatctttagtaatcaatgagggatggttgggtgactgccctccaggggacatttggcaacatctggagatgtttttggttgccacaacttggggagagagtactgctactggcatctattgagtagatgctattactttaaatggcaaagctgcagttacctttgcaccaacctaatattaaacttcctgcagtgcacgggaaagcccccacaacagggttatctgaccccaaacctcaatggtgttaagatccaaaccttgatatgttaacctgtagctttaaacatcctttaaattgtcaaattcatgtccctgacataaggtttatgttagattttcaagtataacaaagatttaaactttaacttttgtacgttaatgatatgttagcttactccagtcttctattaaaacattctgtttttaaaatcagagacacacagcaattttataaatcatttctcttcaaggctgtgaagctctccccacttttgtgagtgccctctactggtcaaattatttgctttataacaagtaacagtgaaatcctaagtttgtgtagtttcgctgtttaaattatgggtggcatcaatttataaatatattcgttttatttaaaagtcttatatgattgatttcgtatcatttttgctctctgctaatattaatataaagattactgtctgtattagttaggcctaactaagtaggtgagtatagtgaactaagaaaggaaacgaggcagtatataagaaaatagggtggttcagttgttaacacttactgagcttactttgttgaagggactaaaaggcagcagtgtggctctctgagcttctttgcatgcactcaggagctgcttaatggagtccaaggcttggtggtgtgttacaggggatgataggagggtcctattcagaagtggcaaattgtgaaagtgcacattttgtagagttttataggactgtagaatagttgtgagcacctgatttttagaataaacagaaaactcaggtactgtatttaggtcaaattaagaataagtatttattaagacctgaatataaaactttactggtcatggtttttttctaccttgggtttttataaatccaaagatttaaaaacatacaaatggaagttggtaatggaattaagtgaaaggaaaaaatgattttatggtttggaatctcctaagattctggttttaacaatacaactaattccttaatcctagaaatgttcttcactgcccactttgtaccatgcagtcttcctgtgggctagagatacactgaggcgcaaaacagaccagattcctgccttcatggagcttattagttttaggtatctctagatttcttgtaatacctattacaatgcctgcacatcagttcattcatgtgggttcaacgtagtactcagtacatggcaaattcaagttttacttttcggaacttcatggatttttttcctcagaatatcttttatccataattggttgaatctgtagatgcagtacccatggatatggatggcccactttattttgaagagcagtgtttctaggcaatcatgctaattatatatgacttaatttagaggctttatacttaagagcattacatttctggcgtctcttaaccattattatttcataatgtgtaggttatggaacagttaaattattgggatcttaatatagaaattagtagaaataagccagatatggtggctcatgcctgtaatcttagcactttgggaggctgaggctattcgctgtactattttttactacttttctataggtttgaaattttttcaaaataaaacattgaaaaaagtaaggtaggtagtgtgtccctccttaatcctttcaaatattttattttcactatttctattaatttttttttttgtttttgagatggagtctcgctctgttgcccaggctggagtgcagtggcgcgatcttggctcactgcagcctccacctcctgggttccagccattctcctgcctcagcctcctgggtagctggtattacaggcatgcaccaccacacccaattactttttgtatttttagtagagacggggtttcaccatgttggccaggctagtctcgaactcctgacctcgtgatctgcccgcctcagcagtgtcactgcttctagaccgttttcaaggcacagagcttagaaatgcatgttactaagaaatcaagagttaactatttttcaccttctttctcccgcagtgagaaccctggttctaccctgtttctccttgtgtaaattttaatgctaaactatacacttgtgaaataaaaatgataatgtcattcttaaattatggatcttgcagtgttatctaagtaacatagattgagtgatttaactttaggtttccttatttgtggaatttggataaatatttttcacccttgagaaaagtgagactcctttctcatcatcagagtatccttaaaccattaaggcaaacatttgggaaaaaactgagctatctggctgcataaaaattaagttttctttaacaaagatagaagacaaatgaaaacctagaaaaaccatttggttcaagtaacaggaagctatcttatatatgaattagagaaaagcaaacacacaaatagaaaaaaagggatggggggtactaaagatataaatagcttgtctaccaaaaaagaaataaaataaataacatgaacatataaaaagacacttacttcatgaatgtgatgcaagttcaaacaataaataacatttctgtactttcatattggctaaggttaaaatgataactgctaggaagggtatggagaagtgtgcgccttgcactgtagtgggagtatagaccctcagactttatggaggtcagtctggaaatatgtttcaaaatgtaaactacatgtcctttgaccaggtaattcaacttcttgaaatttatccaaggatttaattggataaatgtttaagatgtatatataagaatgtttactgcagtgttgtttatgattttaaaaaaatggaaatcatcttcatgtctaccaatagagaatgggtgaataaattatggtatgtccatatatacaaattacatagttgttggaaatattaggtagatttagatatactgatgttcaaaaatgtccattatgtaagtgaagctgggtcacagcaccttgtgttgagtatgatttcatctagaaacaaaattactccctcatcctttgttgtgttttagttttttaaaataagcttataccattgggctgggggaaaagtaaatactcgttttggagagagaaaagggcactaaagtttcagataccgttagattatttcatgcttatttttcaagcctcaataaattacataattcacatgtagtcttggattaaggaaattgctattaaggctaaataaataatatgagaggtatataatataaaatatgaacattatattggcattaagattggatccacggtcattccagcctctcattcttacctggacttcaagtgatcacttgtgggcaaatgccatctgacttgaacaggttacacatgtatgctcattatatcgttattttcaaaatttgtcatataaattttccttgagttcattcagatttttgaactagttttttctcttgggagtagtacacacttaattctctctagtactaagctaatgttcaccattcttataattttaagtatccagcatttagtaaagaagtctttgttttctttatccttacttttagtgaatgtcttagtttttaattgaaaattctgccatgaaaataagctctttaacatcttcactccctaatcaaaacagaaatccttcatagccttcagttgtagctatccttccctgtgatttgtccagctccattatatttattttgaaatatggtgaccagttttgcaaaattatttcaactgtaggtgcccagtgattttgtaaggagaagatactgtttctgaacagttctcagtagccagtggcctgcccctactttttggcctgcgtgtagtatataaaataatgcagttaactttttatagcacttttcattttataaagagattttcatggtctttaatattaatctatgtataaagtcctgtatgcagttttacctactttcacagctgaaggaacaatagcttagagaagatgtgagataaagtagtttgcccaagcccatagcacaaataagtgaagttcttcggctgtccatggatcgaagactcccaagtctatctctagcctggacttctgtcctgagcaccagacatgtatgtatatcaagatgcctgcaggtcatatccaccaggacaacccatgagtacagggaattcaacatgcccaatatcactcatcttttccttcgccctcccctttgtactcatcccctgtcggtaagctctgttattttaaaaaattgaaatgtattcacatagcatacaatttacacttttcaagtgtacatggtttttagtatattcacaagggttgtgcagtcattactactaattccagaatgttattatcaccccaaaagtcccacatccattagcagccactccccaatcccttctcccaccagcctctaaaaactgctaatttttccatctctgtggatttgtccactctgattatttcatataaagagaatcgtacagacgtggccttttgtgtctggcatcctccacacaggatgatattttcagagttcgtctatgtttttgcttgttgatcattccttcattcctttttctggctgaataatactctgttatatggatataccttattttgtttatctgttcatttgatgggcatttgagtgatttcctctttttggcaattttgaataatgccactataaacatttatgtacacgtttttgtgtgaccatatgttttcacttctctcgggtgtatatctaaggtacagttgctgggttatatggtagctctgtctttgactttttgaggaactgccaagtggttttggtagtgattgtactgtttacattcctaccaacaattttacctaagtatttctcaaatctatttaatcttttcggtccatactgctgttgctgccttagttcagattttgtcatttcttgtaataattcgtagctcatctcccagtctctgctcccctctctccctccctcccccttcttctctctcttatttccacccatttttaacatttatagaagtcaaaagtctagttcagaaagcagaaaccatactagatatttcagcacagagaactaattaggtgttggaagactgaaaggcaaaaaaacactgaagtaacacagtaacatcaagaatgggcactactcctaagattcagggaatgctgggaagatttggggtttatcagaactggaagctcagaggaggggccccttgtcgctgaggcttaatccctgcagaggtgcctttggctgctactggtgaatctgagtgggtatgatgagtcagtgtctgggaagggccaaaacattttgtccctttctataatttgtcatgataatgctagtaatgaatctgatctcccttcctattttaaaaaccttttagtgattttgtataggatgaagtttaaaactccttacttaatatacacatgaccctccgtaagctggcccctgcttgattgtccagtttcacttcttggtgcttattctaaggcctctaagccttagagatcctctaagcctttgagatccccaaaccctggactgcggactggtacccacctgtgtggcctgtgaggaactgggctgcacagccggaaggaggtgagcattacttgccttagctcctgtcagatcggcagcattagattctaataggagcgtgaaccgtgttgtgaactgcccatgcaaggatctaggttgcatactccttaggagaatctaactaatgcttgatggtctgaggtgaaacagtttcatcctgaaatcacccccaactcggtccttggaaaaattgtcttccacgaaactggtccctgatgccggaaaagttggggaccgctgttctaagctaaagttatatggagctccttggttctgtgtcctcaacatgctgttctatgttttttacattctgtttgctccttcctgcttggaatgtccttcccctccccgtctttcttaatgcatacaaagttgatctctcctgtgtgccaccattgtacttcgtcttgcatatggtgttacattcattttattttaattatttatttacgttcatgtctcttccactcaccttagttgcttgaggtcagaaactatataatgtgtgacacggaatgtgacacctagattttcaataagtgtttctatgatacaagggagactgatgtgggtagatgggaatgaactcatcaacctctgtttacataccctaaattccctgtttcttccctattataattctgacagtctacaaccgtctttgatggcttataaacggaaagtgcggaacacatcattctacagtgaatttaaataacctttcggaagagtaacgtaaagtacttgagcattaattgagtaaaagtttctcatcttttcctacaggtgttattaagcagtatgtaaaaagtccttacaatacttaatacattaagaaaacatacaatttcaagaggaaatccccgagtaatacattattgacattttcagcagttctagttatattgagaagagcatctcatggaattggcagaatgaagatggagattaaatgagatgatgtttgtaatatgcttatgacagtatctggcatataagtaagggctcagtaaatgttgactgctgtaattactattaatagtaatatgattacctttagtaaaagttattagtttctttaggttttttgtttactacaatatagtaaacaaaatctatacttggaatgtatatattgttttgttttgatacatggaatatgtctctgtgtcagagtcactgcctgagttggaaaacccatactcgagtatgttaaaaggtgaacacactgaataatttagttattaattataatggaaaaatgacaaacttgatgttctggttaatgaggttatcttatcttgaatgagttagcttttaaattcctcaaaataaaggcatttaataaaccaggaaacacttcattaaaaaaattatgcaagtcagtgtaaaagaagattaaaattccacatgggcaaaggacacacgttggcgataaatatgcagataagaaaaaaaacctatataacattattactcctcaaagaaattggtatgaaaacaataaaaatgtgtagcttatcaaaccaacaaaaatttaaaaatatgaaatccattttaagtaatgataaaatgggtgcactcttagtgctttatagaatagtagtataatgaacctcatgtgtgtaccaaccagctctttcatatcttaacatttagcaacatttgatttagctctttcttttttccaagatagaaaagttaatattgttgaagactcctgcattcttttccctagtcttattttcttccctcccataaatgtgttaaaatctctgtgtgtattgttttggttgtatttttacataaaactttacatattatataaaatttaattgaaggtaaaatttattaaattattcttaatatatattgtaatttaaaaattaacagcttcattgtcttgataaaatttatggtatcttaaacatgtgcttgtttttctaagagaacattgaaacatagattttaaaacaaattgttgaaagattaaaaaatctgcctttgcacactgttacattgaaagtggggcatttgtcgtgaacattcatttcaaatatgtagtatcttcagaatatttgagaaggatttgtattatataattgaaaaatctgttaaattgtatttatgttaactgcttaattctaataaaatttccattcattttttagtatctgcatatatttacatcaaatggattcattcacttatttaagaggcagtactaattacctatagcgttcaagactgttaggtagagggtgtgtagtggtgagtacaacaggcgtgagccctaccaacacggagtttaaagcctagtagaggatatagacttaaacaatttcacaagtaaatacataattacaaattataatacatgctatgaaggaaacataggaggtaccagagaaggaagagtgctttgcatttttatttttaagaccgaagagtgctattggaggactttgagcaagtgaatgacatgatctaacctaccttcgttcattcattcattcattcattttcttccttcctggctcaagcagtcctcccacctgagctccccaaatagctgggactacaggtacacactaccacacctaatttttttttgtattttttgtatttttgatgggattttaccatgttggccaggctggtcttgaactcttgacctcaggtgatccacctgtctcggcctcccaaggtgttgggattataggtgcctagcccatggtgcctagccctaacctacatttataaactatcacttgctgctgtgtggagactatattgtgagattaacagcagggatacctgctaggaagcaattgctgcagattgcctgagacaaaatagttatcatggactagggggatggtggtggtggtggtggtaggtggttggatgtaggatatattttgaagataggtaaatggtgcaagattatgggtcagttttaaatgcttaagtaaattttctttgtaagacattttaggatgccatgttaagaatctctttataactgtcatttaaaaaaaaaccacatattttcttagcataatttcccatagtaacattactatgtcaaaggctatgaacatttgaatgactttagataaatactgtaattgctttccaaaaatattgtgcttattatgtcaccagaaatgtttgaattctgtctacaattcagtcttgccagtatagtacatttcatttagaaaaattttttactatgtagatggaaaaaataatattttagctgggagtggggggactatggggaataactttccttcatttaatattttattgtgagttagtttaagttactttattttatcgtagtttcctaaggctacaaattagtaaccttggtaacttatgtacctaatttaaaagtttacttttttgaaaggctggaaatactaattaaaaacgtaacaccttcatccttgtctttgctccattattaactagtttcattacagaatctctgtgttttaaaatcagatgggttttcataaccagtactttctcagagtggtaaatttaaaaaaatatataaagagaataaataatatttgttgagaatacttcaaataatgtgaagagttattaacttacagcaggagttggcaaacttttctataaagggccatatgggtctttgtcacaaagtcttgggtttttgtttttgtttttttaaacagctatttaactattcctagctaatgggcaatacaaaaacagtgggcaagatttggcctgtgggcagtagcttgctgaaaccttatttagactctaaattttttgaaagagtctacattgatgcatatttttttttcttcctccaaatacagttgacccttgaacaacatgcgtttgagtgaccatgggtccacttgtgatacacgtttttttcccaaccaaatgcagatatggagggctgacttttcatatacctggatgttcctgggccaactgtaggactagaggctgggggggtcttggaaccaatgccgtgtgtataccagggatgactgtttcttatggcctgacctgaagttggaacagaatctttattaatatataatttttgttgcgtttgttttctctttatatttatccattctttttagatcgtatttcatttaacactttttcttctttagtttttaccaagttgcactgaaaatagctcagtgactaattgcacttctaagagtgaggaccctagttaaaattaactctaaaaatactgaatttttaacctaaaccttttatttctaatcaacagtattatttatgagtaggttatagattactttgaaacggaatgtgtctcagaactttgctatcgatatttttaaggtctggtagggaaaagataataggaatgagatttatcagtgaataggggactgctttcccagtttctcggtcgcactggtgtattcaccatggaagcatcttatgaaatatgtacataaactactaatatcccacattacaggttgactattctttatctgaaatgcttaggacctagaagtatttttggattttggtttttcagagtagggatactcagcctacattggtaagtaaagaatgtgaggtgacaggctgggcgcgatggttgacgcctgtaatcccagcactttgggaggccgaggcggatcacctgaggtcaggagttgaagaccagcctggccaatctgtactaaaaatacaaaaattagctggacacagtggcacgtgccagtagtcccagctactcaggaggctgaggtaggagaatcgcttgaacctgggaggcggaggttgcagtgactcgagatcgtgtcactgccctccagcctaggcaacagagcaagactccatctcaaaaaaaaaaaaaaaaaaaaaaaaaaagaatgtgaggtggcagcaataggtaggaagagtctttggtcagctttacatgctctgtagccatgcctgggtaatgggttgactctaagactctgtgctttgctcccacctcctgctttttcattactctttagaatggtttttaatttgtgatctataggagttctttcaagtatttaataagagaataggctaaattaagtaaatgtcaactgaatgctcaaatctctactaaagagcctcttatttagaaaataaatatccatcttttttttctgactggtgagataattaatttttattacagatggtttggaaaataccatatgctttaaaagataagcacaaaattatagtctaatatgtaggttttcatactttaaaaaattgaaaaccaaagaaaaacatttaacatagcatctagtacaaagaaaagagataagcaagagataaatgtcttttttgggacagagttttgctgttgttgcccaggctggagtgcaatggcacaatctcagctcaccgtaacctccacctcccgggttcaagtgattctcctgcctcagcctcccgagtagctgggattacagtcatgcaccaccaggcccaggtaattttgtatgtttagtagagatggggtttctccgtgttggtcaggctgatctcaaactcccgacctcaggtgatctgcccaccttggcctcccaaagtgctgggattacagacatgagccatcgcacccggccaagataaatgtcttttaaattatctccattaaagacataacctttataacattttgatgtatatattaccagtttttaaacacatagtagatttgtataaatacataaacacatattattgtgatcatgctgcacttagacatctttatattctccttatactgtaaacattttgaaatactttactaacaacatttgtaatgaccattctttctctctttctccctctgatagaatggtctacagagtaattcataaactaaacatactttagaggctgggcgcagtggctcatgcctgtaatcccagcactttgagaggctgaggcgtgcagatcacgaggtcaggagttagagaccagcctgactaacatggtgaaaccccatctctactaaaaaaacagtacaaaaattagccgggcgtggtggcgtgcacctagaatcccagctactcaagaggctgaggcaggagaatcactcgagcccaggaggcagaggttgtagtgagccgagattgcaccacagcactccagcctgggcgacagagcgagactccatctcaaaaaaaaaaaaaaaagatacattaatactatagcctacatgtggaacattaagaaaataattgcttttatgtttatgctttatacctgttgttagccctgcttcttatttcatgatttcatggcttcacattgtaacatccctttaccatattttttgaggactgttttggcagaatgtgtgaaatcttgagcagaagtattacccaaaagtcagaagaaaatcagatttttatttcaagattctgttaaagttacccactcccttcttttacttaatcttatagttgcagttctctctctttttagaaaagaaaaaagaggcccctcaggatttgcagatgaaacaatattgctctttagagatatccatctggctgttagattatttttccacagttttcagaagtggatgaggccattagaatcttgagtattgcccatttccttatgtgtgcctttgactatagataaaatagatgcatgacaattatttataagttgattgatttttcttgtcatttaaatcatcttgaataatagagttggtagagctatcccatttttgaaattattttgttttgtcaataactttttgttaccagcatgtacacttgcattgttgactctccatataatacctttaaaaaatttttttttgtggtaaaatatgcataacataaagtttaccatggtagttttctttcatttgttttgtttttgtttttttgagacggagccttgctctgttgccaggctggagtgcagtggagcgatcttggctcactgcaacctccgcctcccgggttcaagcaattcccctgcctcagcctcctgagtagctgggactacaggcgcccgccaccacgcccggctaatattttgtattttaatagagatggggtttcaccatgttggccaggatgttcttgatctcctgacctcatgatccgcccacctcggcctcccaaagtgttgggattgcaagtgtgagccaccgcgcctagaccatggtagttaattttaagtgttcaattcagtgaccttaagtgtgttcataatgttgtgcaaccatcaccatgttgtctaaccattagcactatctgttttgagaacttttttttatcatcccaaattagaattctgtacctgtcaaatagtccccagtaatcctccctcccccagcccctggtaatctgtagtctacttttcgtctttttgaatttgcctattttaggttcctcatataagtggaattatgtggtatttgtccttttgtgttggcttacttcatttagcataatgttttcaaggttcatctgtgttgtagcatgtatatacaggttgaagcatccgttatccaaaatggttgtgaccagaagtggtttggatttcagattttttttttggattttggaatattcatagatacttaactggttcagcatccctcgtccaaaaatccaaaatcagatggagctcagtggctcatgcttgtaatcccaacacgttgggtggccaaggcaggaggatcgcttgagcccaggagttcaaccagcctgagcaacacaagaccctatctctccaaaaaaaaaaaaaaaaaaaaaaagatgaaagaaaaaaaaatccaaaatcaaatgctccagtgagcatttccttttagcatcatgtcaggctctaaaagttacaggttttggagcattttggatttcagatttttggattaacctgcattaatgctcaacctatatgaaattttattcctttttatggctgaataatgttccactgtatgtatatactacattttgtttatccattcatctgttaacagacacttaagttatttccacattttgggtattataaatagtgctgctgcgaacattggtgtacatgtatctgtttgagtccctgtttttagttattttggttatatacctaggaatggaattgctgatcatatggtaattctgtgtttaactttttgaggaactaccactgttttccacaatggcatcaccattttacattcccaccagcaatgcacaaagatttcagtgtctgtatccttgctaacacttattttccattttttgagtttttttgttttgtttttttaataatagccaatcctaatgggtatgtggtagcatctcatggttttgattttattttcctgactattgatgatgttgagcatcttttcaggtgcttagtggccatttgtccgtcatctttggagcaggaacaatgtcttttcaagtcctttgcccatttttaaattgaattttttgttgttgagttgtatataacaccttttttgaagtaaaaggtgcactgtaataatccagactgtgtttctcccttctcaggattcctacaggaagcaagtagtaattgatggagaaacctgtctcttggatattctcgacacagcaggtcaagaggagtacagtgcaatgagggaccagtacatgaggactggggagggctttctttgtgtatttgccataaataatactaaatcatttgaagatattcaccattataggtgggtttaaattgaatataataagctgacattaaggagtaattatagtttttattttttgagtctttgctaatgccatgcatataatatttaataaaaatttttaaataatgtttatgaggtaggtaatatccctgttttataaatgaagttcttgggggattagagcagtggagtaacttgctccagactgcatcggtagtggtggtgctgggattgaaacctaggcctgtttgactccacagccttctgtactcttgactattctacaaaagcaagactttaaactttttagatacatcattaaaaaagaaaaccataaaaaagaatatgaaaagatgatttgagatggtgtcactttaacagtcttaaaagcaatcgtgtgtatagcatagaattgcttggattggataaacagtggcattatatattttaaaaaataaaagttttgaaagattgaagaatttgggcattacagttctcttaaatctgacaaagctgcataaaactattaaaataatcattattatactattttatattctatttctttgagggtttagttttccaaaaactacatattaagcaaatgaatcactcagtggctatgtcatataataacgagttagcctagttataagaagtttaacattttatttaagaacattgttacagcatgtttactgtatagtctagtaatagaggaaaagacatttgggtgggtggtagtggtagtatttttatagaggagttaccaaatttcagctctattatccaagtttacccagctaatggtgttcggaaccgggaatttgagccaattctgactctgttgtctgctctgctccttcttttgtgctgtgtctttgaaagtcacctaaaattgtgagggaatgtaatttcaccccaaatttagagtttatgcacttgttatattgaaaatgattaacatgtagaagggcttttaatggaataagtggtgtagtaacttcagtgttgcctacctagaaatcaaaatctttctagttgtccactttgttttttgaaaaagtaatatgaaaattatgttaatgctttaattcaggtttttgtaaaatattttttatctttacacatttaacatacgtttctaaaattatagtctgttatatagcactttgggtctagaatttttcagtagtttctgttttactattatgatctacctgcatattaacctattaggttatagttttactatacttctaggtatttgatcttttgagagagatacaaggtttctgtttaaaaaggtaaagaaacaaaataactagtagaagaaggaaggaaaatttggtgtagtggaaactaggaattacattgttttctttcagccaaattttatgacaaaagttgtggacaggttttgaaagatatttgtgttactaatgactgtgctataacttttttttctttcccagagaacaaattaaaagagttaaggactctgaagatgtacctatggtcctagtaggaaataaatgtgatttgccttctagaacagtagacacaaaacaggctcaggacttagcaagaagttatggaattccttttattgaaacatcagcaaagacaagacaggtaagtaacactgaaataaatacagatctgttttctgcaaaatcataactgttatgtcatttaatatatcagtttttctctcaattatgctatactaggaaataaaacaatatttagtaaatgtttttgtctcttgagagggcattgcttcttaatccagtgtccatggtactgcttttggctttggtttctttctacattgaaaatttctcttcaattctgagcacatgttaacatttagaattcaagaggtggggatttttttttcccatggttacatatatatatatatatatatatatatatatatatatatatatatatataaagaacagggcaacaaatttttgcgttttctatttcggtagtacttttaaaccattatgtcatgtttctaggttaaacgttgttgtatttgaagaattttactttggcagaatttttttgaggatgtgtttatttctggagaaaggtctcattaaagaaagacaatacccagaaagccaacagaaattctgttactcatttaatgcatttttctgacaaaaattattgccagagagaacctgaattttgtttcaaaaatcatctttgttttaaaaatgactttttcttcaggtaaaataaaataatttcagttgctattatttaacctgtttgtatgaagagtttaacatataggaaatgaatacataaagataggaaggaattaattgttatatgtagtcatatgtctcttaatgacagggatactttctaagaaatacattgttaggtgattttgtcattgtgcaaacatcatagaatatacttacacaaaccttggtagtataacctactatacacctgggatatgtagtatagtctcttgccccagggatacaaacctgtacagtatgtaactgtactaatgactataaggcaattgttaacacaatggtaagttttgtgtgtctaaacctacacttgggctaccctaagtttatatatttttttaaatttctgttcaataataaattaaccttactttactgtaactttttaaactttttaatttttcctaacattttgacttttgtaatacagcttaaaacacacattatacagctatacaaatttttctttccttatatctttattctgtaagcttttttccatatttaaaattttttgtttgtttttacttattaaacttttttgttaaaaactaagacatgcatgcacattaacctaggcctacacagggtcaggaccatcaatatcattgtcttccacttccacatcttgtcccactggaagatcttcaggggcagtaacacacgtggagctgtcatctcctataataacattgccttcttttggaatacctcctgaaggacctatccaaggctgtttatagttaacttttttttttttttttttttttttttagtaaataggaggagtacactataaaataacaatataggtgctataccattatacaactgacagtgcagtaggtttgtttacaccagcatcaccacaaacacgtgagcaatgtgtcgtactacagtgttaggatggctataacatcactaagcaataggaacttttaaactccattataatcttatgggaccactatcacatatgcaatctcctgtggaccaaaatgtcattatgtggtacatgactgtactaagaaattgatccatctatattccatcaatttgtttagggctttttctggttacatttacctgtgagcccagaaaaccagttttgtagaaattaacttctgtaatgctaggagttaaaaaaaattgctgaacaacttttacattgttaaacatttaaaaacaagcgttctagaagtttatcaaatttcataaaggtgcaaaaatgtaaatgtaaatcattatccagctaatatatatgttgtatttccctagtaggagagcatatgtacctcttcctagttatacaaatttgatatatagtaaagaaacagtaaattctacttcaagtcattttgggaggattaaaaactgaatttctctagtttgaccattgtacagatttatctggcaattttactaaaacctgatttataggttaaacttggtgtatatcatatatcactttactttagaggaattaagatttcacataaatccatttccaggttccaaagaccaggaagaggcttggtttttgtttttctttttactgtctttacagtctccttgacttttcttaggagagaaggtactgagaaaacatgattctaatatttattattttttcttccaacattttcttatgaaacattttcaaatacaaaattgagttttatttaaaacatttgcaaatatactacctagattctaccattgttgttttatatttgctttacttacaacttttaaaagatgctttttataccactgaacattttagcttacatttcacaaagaaaagaaaaaatttaagagactttgcataatgttttaaggggttgcagtaaagaagtgcttcttatattttcttatgcatacaaatcagctgggcttattaaaatccagattctaattcagaaggtttaggtggggaccgagtctgcatttctaacaaactcctaggtggtatttttcttggtacttggaccatactttgagtagaaaagcagtagaggacataaaaagagtcttgttagtcccactttgttgctgtccacttctcatttgataatatcctaaaatagctgtgtctcctttttggtggttgtatgattactacctcagaagtactaattgattcttgctatttgaccttaatactttaatataacacagcattcatatttgatcagaaaactatctggcttccttttataagagatttttaggttttatacagttttgtggccttgggtttttttgtttgatttgtttttttgaaggtatataatatgtaagtagataaacaaatttgatttgtagacatttttatgtggatcatctaattaaaaatggagggatacagtatgaaagaatacttgtacttcttaacagagcactcaacctttcttttacatcctgtttcactgatgttattatgtaatttatgttgctaaactataaattagatatttaatttctgttctttgatttccttttattattaaatggacttgttgatttgcctagaaattaatttgcctttcaaaagtcttattaatcttcctccgttgaaattaatttgatatttgcatgcttctggaagactttaaagagctattccgagtaactgtagagattataaaatgaaatatgggaattttaataaattttacatctccagttactggtgaaaatgtcaagtcctcctttctgcagagtattttgttactcatctgttattcagcttatttatttatttatttatttatttatttttctttctttcttgttttttttttttgagacggagtcttgctttgtcgcccaggctggagtacagtggtgggatcttggctcactgcaggctccgcctcccgggttcacaccattcttctgcctcagcctcccaagtagctgggactacaggcacccgccaccatgccttgctaaatttttgtatttttagtagagacgggtttcactgtgttagccaggatggtctcgatctcttgacctcgtgatccacctgcctcggcctcccaaagtgctgggattacaggcatgagccaccgcgcctggcccttatttgttttttaaacaaaattagtgtgcatatccttgttgtattttatcggcaagttgttttatgccctaacttttggggtcttgatcatgagcctaaaacacgtaaacacccaaaaagaattatattccggttaaaggaacaaaacattcatttagaagttctcatccatgtaaatcagaggctggcaaatattttctgtaaagggccaagatagtaaatgttttaggctttgagggccacaagtggtatctgttgcatttttttttaattatgaccctttaaaatgcaaaaatcgttgttagcttgtgcatagtataaaaataggctggccgcatgctgtggctcatgcctgtaatcccagaaatgaggtgggaagccgaggtgggcacaccacctgaggtcaggagttcgaggccagcctggccaacgtggttgaaaccccgtctctactaaaaatacaaaacttagccaggcgtggtggcgggtgcctgttatcctggctactcaaggggctgaggcagtagaattgcttgaacctgagaggcagaggctgtagtgagcccagatcaagccagtgcacaccagcctggacgaccgagcgagactctgtctcaaaaaaaaaaaaaaaaggctgtggctgcatttggtccattggctgtaatatgctgattcctaattctctgggtaactttagtgtttgattagctactagaagttaggttaaacttttgtattttacaggctaactttaataatcttaaagtaaaacttaacatagttcatggaaaggaaatagaaattttaccctagtactcttttttttttttttttttttttttgaggcagagtctccctctgtcacccaggctggagtgcagtggtgggatcttggctgattgcaacctcctcctcctgggttcaagcaattcttgtgcctcagcctcccgagcagctgggactacaggcacgcaccaccacacctgactgatttttgtatttttagtagagacagggtttcgccatgttggccaggctggtcttgaactcctggcatcaagtgatcctcccatctgagcctcccagtgtgctgggattacagacgtgagtcactgtgcctggtctctagtattttttttttttttgagacggtctcactgttgccaggctggagtgcagtggcgcgatcctggctcactgcaacctccgcttcccggattcaagcgattttcctgcctcagcctcctgagtagctgggactatgggtgcacaccaccacgcccagctaatttttgtatttttagtagagacggggtttcaccatgttggccaatatggtctcaatctcttgacctcgtgatctgcccgtctcggcctcccaaagtgctgggattacaggcgtgagccactgtgcccagctgtactttttaagataagaattgcagggtatatatttttaccaacttaataacttataattttaaaaagctaattacttggctagaatataatgcgttacatattctttacactcagttcagtccatatctgaaaggcaaatagaattattttctgctagtacattgtgtagtccctatgttcctagtgtataaggactgttacctagttcacatttatctgggttgttgacagattttcctggtccctttggacagtgcatggccatgttggcaaaagctgtcaaaattgaaacattgacaccatgagaattgtgtgttttccagtctgctaaaatcaaaagtgggagggttcagtaaggtgaataacagaagcagagttttcggggtatctgttactcctcattcggcttttctgctctctgggggtctcaatttaaatataatgtgaaaattagttttacgaacctaaaaatgttgagtgattcatttcctggttttgttgttaatttctagatatttaaattaattgttagaagaaccccgttaaagaatgctttgcaaaacaacctccttatgtgctatgtctctgtttaatagtagttgagtttgtgtacatgagatcaatattttgaactatagctttttatgagttaaaaattgacggaacagttactgtgcacttgctgtgcaccatggtagtctcccaagtagtggtttttctgcatttcaatagtacatgagataggctgtgggtggcaaggtttcttgagaaagtgagggatgcacagttgggttttagaatacatcttgttcctccatgcccttccccaccaaaaggctggtagtcttgcatttgtatatagttagggtatttgatgtgttgcttccttgacagagttttgcaagaatttgcagatttaacaggaacaaaaacttacttaaaacaaaatctcttagtaaaagcatagtctagcaagatttagaatgatactttggctaacagtactttctctatatggagtgctttgtttccatagcctcacaagtatgttttcagataatagttgagttgaaaatgttgtcaatctcttgattttaaaaaatttacatatttaaagttgtatacttttgttcctacgtattttcagttgttcttaaagtttaataagtgacatttgaaaatgagtatatgtgtataaaaacaaaagtaggctaggcacggtggctcatgcctataatcctagcactttgggaggctgaggcaggcggatcacaaggtcaggagtttgagaccagcctgggcaatatggtgaaacccccctctactaaaaatacaaaaattagctgggtgtggtggtgcatgcctgtagtcccagctactcaggaggctgaggcaggagaatcgcttgaacccggaggtggcggttgcagtgagccgagattgcaccactgcagtccagcctgggcggcagagcgagactccatctcaaaaaaaaaaaacaaaaaaagaaaaagttaaaaaaaaacaaaaaacccccacaaaatgagtatatgtggcaacaagtcctattctcaaaaaaattattgtgtgctagttaagagcttaatgagtagccagtcggtattaaatatctgtttcagctatattttatctttaaaaattatctacagattttggaatgtgaaaaactagtgttttgtttcataggtatatactgtaggcattttaaaaataagagccagtgccagtggtttacagtgtacacaaggataatgttctcatgttctcttgatgtcagtatgactttaaagcatattatcaagaaataactaagtctgaaaaactgtggtaaataactggtactctaaaacctaagtttcttattactaaaaataagaaatggtaaaagtcaccctgtgctgttaattatatgagccactgaggtcctgacactgaattcttggtggtggataataatctcttctttttaattattggcttccaattctctctgcattgctggaaacaaaaatcatatatttcactattggtggtggggatgctgtcactgaaaaagtagacacattcatattgattttagaaataagttaaaatcaaaatttgcttctgctaaattagtagaggaccaatactgtttttctccttcatagtatgttttggtacttctacattgacattataacttttttttttttaaacagaaatagaagtttacattcttagaaaatttatgaaaatatgagcttttacctggtttgtgtgtgtgcgtatatatatacacatatttttaaatttcttacattgattttcaaattgaaagagaaccatttgtgaaagtatcttaacagagctcatgctttacattttacatgctacaaagttattttagtgccttaaattatttatgttgcttattaatgaaaattttggatacataattttttcaagacaaaggtaaaaataataaaccctttccttctgaggattaatgataaatataaactttaaaacgattaaaaaaatttttttagagacagggtcttgctctgttgcccagactgaagtgcagtggtgcagtcatagctcaatgaagcctcaaactcctgggcccaggcaaccctcctgcctcagccttttgagtagctgggacttcaggctcatgccaacatgcctaatttatcttatttttagtagagatgaggtctcaaactcctggcatctcttgccctctcaaagtgctggtactacaggcattagtcaccacacctgacacttaaaatcttttatatacaggtgtaagtgggtatctaacttaaagtgccaacgaatgtagttgaaagtttgtagttggcttagctaactagttaactaaattgattccattaaaaataagataagactgctcttagaatataatgatttttgttattcgttaaatataaatatatcactggatagtatatgttaatgacttgagatacgcattttaacatataatcacgttacttaaatgcctgcctttgaactgaaacttaacattatgaatttaaattaaagtttgactttagaggtaaatttctgtactttactaaagcagttcttaatataattctgagatttctaaaaattagtgtgccctaaagaattgaggtgtgtttttcttaactactgtaggcagtagatgtacagatgacttctgcatgcaaaaattaagccctagccattggtttacttcaactaatacttagttgccaattctctgtgtgtgattgaatttaaaactgcaaatggtactggtgatacattaactttttaggtgctaggtccactttgttacatttggttcagtagaaacattgatgttaccaatctcagaaagctaaaatatgtatgccaatccccaaattaggtaatttattcttaattttaagataaaagaatagaattcccttaaaattaaatgtggagtaaaatataccagctttaaaaaatattcacctttctgttagaagaatgaacataatattacatcttttaatttgcactatatatagattaatatttctgtgtatttctctgtgcccctactttgatggtatgcttttctgaacaaactagcagcacagttaactaagcactttgccccgtttgatgactgcctaattttctagattggaaaatattaaaaacttttatctccatatggccaatatatgattgtacctgttgtcatagctctcttatgtttaagcaagaaaaaccctattaagagtatttaaattagaatggaaggcacacagccagtatgattgaacactgttctaaaaattatttttaagacttgtagtaaggccaggtttggtggctcatggctgtaatcccagcccttaggaggccaaggtgggcggatcacttgtgctcaggagtttgagaccagcccgggcaacatggcaaaaccctgtctctacgaaaaatacaaaaatcagtcaggtgtggtggtgcttgcctgtagtcccagctatttgagaggctgaggcagggggatcacctagcctgggaggtcgaggctgcagtcatgatcgtgccattgcactccatcctgggcaacccagtgagaccctgtctctaaaacaaaaaaataaaaaaagaacttgtagtaaggatacaaaatgctcctattttgtgtgtgtcctttaattcatgatgtttttatattatggtaagcagctctcatttaagattttaataatgtaattaaacatgtacagaagacccagtctcagcttcacttgtataccctggaaatagactgaaaggtgttaaaatttaagataaaactcaaggttccagtttcttgactcacctttgagattcttttatgtttttgttgttttttaacaaaggtttcacgtccatattttaccatttttcttctcattctcccctggaggagggtgtgggaatcgatagtatataaatcacttttttcctaagtcaaagaagtaatttaaagctaacttcagtttaggctttaattccaggactagcaaactaaaatggttgcattaattgacaaacagatgctaatacctgtgtttaggcttgtcataatctctcctaattcctaatttaaaaattttaaaatttaattccattagaaaacaaaactgacttttaagaacaaaccaggattctagcccatattttaaaactgcatcctcagttttattcaaacagtctgatgtctgtttaaaaaaaaaaaaatctcaagctcataatctcaaacttcttgcacatggctttcccagtaaattactcttaccaatgcaacagactttaaagaagttgtgttttacaatgcagagagtggaggatgctttttatacattggtgagggagatccgacaatacagattgaaaaaaatcagcaaagaagaaaagactcctggctgtgtgaaaattaaaaaatgcattataatgtaatctggtaagtttaagttcagcacattaattttggcagaaagcagatgtcttttaaaggtaacaaggtggcaaccactttagaactacttaggtgtagtattctaacttgaagtattaaaagataagaaacttgtttccataattagtacatttatttttaatctagtgggaattaattataattgagacaattttgatggctgtagtagactaatctatatttggcataaagtctaatgatttaatgagtcttaagtaaactaaatatttggaaactgatatttacctttatttttaagggaaaagttttgagataatcagcagcttttttttttttttttttttttttagtagggagaaaaagatatgagctatagtagacagcagtaatattgaatggcccagaaggtgggaaaaagccactcttaaatgtattttttcttttggatattttacaagcaaataataacttctgcctaagttcgccatctcagtggcatcagcagcacagcactttcttatcccagtgagaaacctgggaattttaggatgactcctaccgccctcttttccccctggtttggaagtatccacaaattcctgtgacgttacattctgtgtcttttatgtcatcattagttcaggcccctatcatttcttgttggactgttagaacctcctatttggtttaccagttgctgccatcattcattgtgaaaccggagagatacactttaaagaaatgtcatttttggccgggcgcggtggctcacgcctgtaatcccagcactttgggaggcctaggcgggtgatcacctgaggtcaggagttcaagaccagcctggctaacatggtgaaaccctatttctactaaaaatacaaaaaattagccgggcgtggtggcacgtgcctgtaatcccagctacttgggaggctgaggcaggagaattgcttgaacctgggaggcagaggttgcagtgagctgagaatgcaccattgcactccagcttgagcaacaagagcgaaactctgtctcaaaaaaaaaaaaaaaaagtcattttagctatagaataaaatctcatgttccacatgtgttgcagatagtccttactaccttcccaccactccagctcttttttggtcttatatctaaaaacgtcatcttgcctgaatttcttttgttcttctataaataaataccatgttatttcctaccttcccttgagtcttggctcttgtttggaatgccagtatttttatccctagtcttactaattagctaacactctcatgattccccagtctcctactctctaaaaacctttctttaaacccttagactaggcatggagcccttcctgtgtattcccagaatactattcttaactattatatgcttcccatgttatgttgaaataactaacctcttctgtttcattcctatattacttgacagcaaaatcttagccagaattacatatttttaatctttgcacacccattgcctagtaaggttcctgggacatagtaactacccagtaaatatttattgcgtggaattctcattttcgtttctaaacccgtattaaactctgtcttgctcagaaaatacttcactaggtatcataaagttcatggcagagcttaagctttggatgcatattgtttgtaatatatcatgttcttaagaataggcaataaaattacagttttcaaaaactactacatttattatatttattacaagttggtgttctttattacatgaattttaggtatttcccaaaagtataaaatatacatttgaatagtagactcaatcccaaaagatactacgtggtgtactaatctactaaactcagaaacaaagcatgactggcattaatttttgttgaaatttatgaactctgaatgtttttgaatatcattctgtaaagcaatattttgcaattaaagcaattttgcatgttaaattttaccacaacctctaaaatattgcaaatttaacaatacagtttgaaaagttacacattttaaataacagtaccatgaccagatttaggtggtggttttaattttttattttctcctcctattgtctcaccattagatgattttaaaaatagaattgtttagagtaaaataagtgttatgctctaatttatatttaaaatgaaggtttaagcacgtactattctaaaatttctaatttgtgcaaattatgttttatacagtgactgtaggtgaatgtcacaattgtttgatgtgacgaatccttgtttttcagtacacgtggaagtaattcatataaaagagaagtatacttggtaattaaaaatttaaaattaaatacaatttaaaaaaaaatttatttgacaagctggctgtggtgtgtgtgcctgtagtatcagctgcttgggagcctgaggcaggaggattgcctgaccccaggagtttgaggttgaagggagctatgatggtgccatggcactgtagcctaggcaacagaaagagactccatctcttaaaaaaagtaaaaataaaaaaattttggcacagggacagtggctcacacttataatgccagaactttaggagtccacagcgcgaggactgcttgaggccaggagtttaagaccagactgggcaacgtaatgagaccccacctttaggaaataaatacataaataaaaatttgacaatgataaacatatataaattagcttttcttagtcctgaaaaagataatgttatgtgtatgtgtgagaatgattagttctcatatgagaaaaaaagaattcattgctctgtgtaggttgtgacatttccttcacgattgaaattaattaatttttttttattacttatttatttttaaaatagagacaggttcttgctgtgttgcccaggctggtctcaaactcctggcctcaagcagttctcctgcctcagcctcccaaattgctgtgactgtaggtgtgagccactgcactgggccaaaattacttaattttaacaagatgatgtagagaggagagttcattgcaacataagcctagaatctttgtcagaatcttaggaagtaatgttttcaaattctgtgttttcaccataaaatgtgtcttctctgtgtccatcacatggtttttcattgttttctgctttaccattttagtaccattggcatttttcttcattgtaaaagtagtagaaatggagtagattacataaggatgtgatcagagggaatttattcattcagggtaagggagttagatcctcttttaagattctatcacattctaagggtttatgattctaaactgtcaagtaaattgtcaagtgctggcaagctacagaataatttttattgtatcattggaaattttcccctctatatgtgttaaagagtttagcctgaagggatacatacacatacatatatgtaatcaaaccttgatggtattgtattgctgataaattatttcttaccacttttcctttctcctgtgggagaaacaaaagcatatgtttgtgtagtatcagtaatgatattagagagtgggaaacatcagtgagtgcagtttggggactttattggagactttcactagtgctcaaataaataatgctggtttttatcctactgtttgcttaatgtggactagcctcttattcccattctatgtttacctctcttaaaatattggtcacgctttcttgaattatagatctattaggaaaattcatgaactgtagctaattttcattgttcatgctccagatttattttgaaatatcgttaatcttagtagtacagtaaaggagaaataccacttaacattttttgtttttttttctttgagacagagtcatgctctgtcacccagtctggagtgcagtggtgctatctcggctcactgcaatgcacttcgcctctccgggttcagcaattctcctgcctcagcctcctgagtagctgggattacaggcacctgctaccacacccagctaatttttgtatttttagtagagacagggtttcaccatgttggccaggctggtctgaaactcctcacctcaagtgatccacccgtcttggcctcccaaagtgctgggattacaggcttgagccaccgcaccccgcccacttaacattttaaattaatttcaagataatatcacttgaatatttttacacatataatttttttaatacatttatttacacagtttataatatcctacaaagtgattacaatgagtaaaaacccagttttcattgttcctaaagtggcttgatttatacaacttaatgtgttgggtatttgtttctaagactccctctgctgtctaggtttggaagtattgtgaggttaacagattttctttttatagttactactcagttgaacaggctttaaaatacagagagaatcatattttttcttcattttttgcttttatttatatttttcttttaattggagacatgacaagaattgacttgtgtatggatcttgcataatttaagtactgcaggtttaaaatctactaccagtttgagagtgccatttttcacactgtagattattaggttgaaaagtattatggcttaaaatcgcttttagccattaaatttaaataaccttgctttaatcataaatagatggtggtcacaatgactaactgttaaactctttgaagacaggatatttggctttatatggcaagcttttgaatacaacagaaattaaaactttatgggatagaaagaatctcctccaaattggtaaactataagacctttcaaatgatttagctaatttctccacaaatctgaggtattagtgttttttttaaagtggtattctcctgtgttggggtcactttaaacctttttcttaatgataaatatatgaattgaaactaatcccttaatatatatcatttgaaaactgaaataatatgtttagatactgtttacttgttgataaattattggaataggatgttcgaatactgtttacttcttggtaaatttttaaatccaatggattttacgtaagtatagaactggagctcaaatactgttactgtgtgtgaagatatatgaacatagtttacagttgcatggcttatatctaaagtccagaaacataaggacaattaagtgtacacacacacacatgcatttggattttgatgacttaggtttgccaatgtggaaaaaatagtagcaaattaagttctcctgtgaaaaagtcgttaccttatttaaaattctgtgccattggttatccttgtcttttgtgaaaattagtgttcctgtttataatattgacaaaacacctatgcggatgacatttaagaattctaaaagtcctaatatatgtaatatatattcagttgcctgaagagaaacataaagaatcctttcttaatattttttccattaatgaaatttgttacctgtacacatgaagccatcgtatatattcacattttaatactttttatgtatttcagggtgttgatgatgccttctatacattagttcgagaaattcgaaaacataaagaaaagatgagcaaagatggtaaaaagaagaaaaagaagtcaaagacaaagtgtgtaattatgtaaatacaatttgtacttttttcttaaggcatactagtacaagtggtaatttttgtacattacactaaattattagcatttgttttagcattacctaatttttttcctgctccatgcagactgttagcttttaccttaaatgcttattttaaaatgacagtggaagtttttttttcctctaagtgccagtattcccagagttttggtttttgaactagcaatgcctgtgaaaaagaaactgaatacctaagatttctgtcttggggcttttggtgcatgcagttgattacttcttatttttcttaccaattgtgaatgttggtgtgaaacaaattaatgaagcttttgaatcatccctattctgtgttttatctagtcacataaatggattaattactaatttcagttgagaccttctaattggtttttactgaaacattgagggaacacaaatttatgggcttcctgatgatgattcttctaggcatcatgtcctatagtttgtcatccctgatgaatgtaaagttacactgttcacaaaggttttgtctcctttccactgctattagtcatggtcactctccccaaaatattatattttttctataaaaagaaaaaaatggaaaaaaattacaaggcaatggaaactattataaggccatttccttttcacattagataaattactataaagactcctaatagcttttcctgttaaggcagacccagtatgaaatggggattattatagcaaccattttggggctatatttacatgctactaaatttttataataattgaaaagattttaacaagtataaaaaattctcataggaattaaatgtagtctccctgtgtcagactgctctttcatagtataactttaaatcttttcttcaacttgagtctttgaagatagttttaattctgcttgtgacattaaaagattatttgggccagttatagcttattaggtgttgaagagaccaaggttgcaaggccaggccctgtgtgaacctttgagctttcatagagagtttcacagcatggactgtgtccccacggtcatccagtgttgtcatgcattggttagtcaaaatggggagggactagggcagtttggatagctcaacaagatacaatctcactctgtggtggtcctgctgacaaatcaagagcattgcttttgtttcttaagaaaacaaactcttttttaaaaattacttttaaatattaactcaaaagttgagattttggggtggtggtgtgccaagacattaattttttttttaaacaatgaagtgaaaaagttttacaatctctaggtttggctagttctcttaacactggttaaattaacattgcataaacacttttcaagtctgatccatatttaataatgctttaaaataaaaataaaaacaatccttttgataaatttaaaatgttacttattttaaaataaatgaagtgagatggcatggtgaggtgaaagtatcactggactaggaagaaggtgacttaggttctagataggtgtcttttaggactctgattttgaggacatcacttactatccatttcttcatgttaaaagaagtcatctcaaactcttagttttttttttttacaactatgtaatttatattccatttacataaggatacacttatttgtcaagctcagcacaatctgtaaatttttaacctatgttacaccatcttcagtgccagtcttgggcaaaattgtgcaagaggtgaagtttatatttgaatatccattctcgttttaggactcttcttccatattagtgtcatcttgcctccctaccttccacatgccccatgacttgatgcagttttaatacttgtaattcccctaaccataagatttactgctgctgtggatatctccatgaagttttcccactgagtcacatcagaaatgccctacatcttatttcctcagggctcaagagaatctgacagataccataaagggatttgacctaatcactaattttcaggtggtggctgatgctttgaacatctctttgctgcccaatccattagcgacagtaggatttttcaaacctggtatgaatagacagaaccctatccagtggaaggagaatttaataaagatagtgctgaaagaattccttaggtaatctataactaggactactcctggtaacagtaatacattccattgttttagtaaccagaaatcttcatgcaatgaaaaatactttaattcatgaagcttactttttttttttggtgtcagagtctcgctcttgtcacccaggctggaatgcagtggcgccatctcagctcactgcaacctccatctcccaggttcaagcgattctcgtgcctcggcctcctgagtagctgggattacaggcgtgtgccactacactcaactaatttttgtatttttaggagagacggggtttcaccctgttggccaggctggtctcgaactcctgacctcaagtgattcacccaccttggcctcataaacctgttttgcagaactcatttattcagcaaatatttattgagtgcctaccagatgccagtcaccacacaaggcactgggtatatggtatccccaaacaagagacataatcccggtccttaggtagtgctagtgtggtctgtaatatcttactaaggcctttggtatacgacccagagataacacgatgcgtattttagttttgcaaagaaggggtttggtctctgtgccagctctataattgttttgctacgattccactgaaactcttcgatcaagctactttatgtaaatcacttcattgttttaaaggaataaacttgattatattgtttttttatttggcataactgtgattcttttaggacaattactgtacacattaaggtgtatgtcagatattcatattgacccaaatgtgtaatattccagttttctctgcataagtaattaaaatatacttaaaaattaatagttttatctgggtacaaataaacaggtgcctgaactagttcacagacaaggaaacttctatgtaaaaatcactatgatttctgaattgctatgtgaaactacagatctttggaacactgtttaggtagggtgttaagacttacacagtacctcgtttctacacagagaaagaaatggccatacttcaggaactgcagtgcttatgaggggatatttaggcctcttgaatttttgatgtagatgggcatttttttaaggtagtggttaattacctttatgtgaactttgaatggtttaacaaaagatttgtttttgtagagattttaaagggggagaattctagaaataaatgttacctaattattacagccttaaagacaaaaatccttgttgaagtttttttaaaaaaagctaaattacatagacttaggcattaacatgtttgtggaagaatatagcagacgtatattgtatcatttgagtgaatgttcccaagtaggcattctaggctctatttaactgagtcacactgcataggaatttagaacctaacttttataggttatcaaaactgttgtcaccattgcacaattttgtcctaatatatacatagaaactttgtggggcatgttaagttacagtttgcacaagttcatctcatttgtattccattgattttttttttcttctaaacattttttcttcaaacagtatataactttttttaggggatttttttttagacagcaaaaactatctgaagatttccatttgtcaaaaagtaatgatttcttgataattgtgtagtaatgttttttagaacccagcagttaccttaaagctgaatttatatttagtaacttctgtgttaatactggatagcatgaattctgcattgagaaactgaatagctgtcataaaatgaaactttctttctaaagaaagatactcacatgagttcttgaagaatagtcataactagattaagatctgtgttttagtttaatagtttgaagtgcctgtttgggataatgataggtaatttagatgaatttaggggaaaaaaaagttatctgcagatatgttgagggcccatctctccccccacacccccacagagctaactgggttacagtgttttatccgaaagtttccaattccactgtcttgtgttttcatgttgaaaatacttttgcatttttcctttgagtgccaatttcttactagtactatttcttaatgtaacatgtttacctggaatgtattttaactatttttgtatagtgtaaactgaaacatgcacattttgtacattgtgctttcttttgtgggacatatgcagtgtgatccagttgttttccatcatttggttgcgctgacctaggaatgttggtcatatcaaacattaaaaatgaccactcttttaattgaaattaacttttaaatgtttataggagtatgtgctgtgaagtgatctaaaatttgtaatatttttgtcatgaactgtactactcctaattattgtaatgtaataaaaatagttacagtgactatgagtgtgtatttattcatgaaatttgaactgtttgccccgaaatggatatggaatactttataagccatagacactatagtataccagtgaatcttttatgcagcttgttagaagtatcctttatttctaaaaggtgctgtggatattatgtaaaggcgtgtttgcttaaacttaaaaccatatttagaagtagatgcaaaacaaatctgcctttatgacaaaaaaataggataacattatttatttatttccttttatcaaagaaggtaattgatacacaacaggtgacttggttttaggcccaaaggtagcagcagcaacattaataatggaaataattgaatagttagttatgtatgttaatgccagtcaccagcaggctatttcaaggtcagaagtaatgactccatacatattatttatttctataactacatttaaatcattaccaggaactgtttgttttgtagtgaaccttgagtatgtgctgttaatataccaaattgggtgaaaaaataagggattcctttcaaaagttaagagaagtaagtgtgtaagaaattattttgcttattaaatgttcggtaaatggcattctcttgtcagtaaaatggagaaataagctaaaaataattggctaagtcctattaagttagaggattaagtgtattatattttcattcaaaattgggtgctcattaatttatgatcggtagtatagctaaattgctatgtttgtatcaaaattgagcataaagttgctgatactttctccgtatgaacagaagttgaaacctatttagttcagtagggcagctcagggattttttacacaacatgtatatcttcccattttaagttagaattattttacaacatctggtatacataaacagctggcactgatagctaaattaaagtagtaatgatcaattagttttgttggtatctgaataatagcgttgtttcatagctctgtatttcctaaggaagtacaaagcttctagctctttcattacaaattcgccctgtgcaataagttctttgatcttctctggattcttcacatctttgtttttaaggaaaatgttcttcaaacgctttttaaaatagtctgctccttttggatagtctcgtccaagatacagcagcttcaaaaagaaagattatatatttctaaacaatccatgtcatataataacatttttataaaattggcaacataattacttacatttttataaagttttagtacttctcctcttaaagaattggccattttcatttatcatgtaaattatccacttttatgcataacatacctaaagaaaggaaaatttttttgcaattagctgcattgtagtcttaaaaaaataaaaaaaggttatacacattgagaaaatggtaaccttttttacattcaataaatatttcttgataactttttcgttccacgtactgggatatagttataaacacttccgataaaattacctgctgtcataattgacgttttcctatgggagacataagcaaagacaattgtgattgtgagaagtcacatgaaggaaatgagaaagtggattgtcatcacagataggtacgtgtacctccttttatgccacagtggaatgagttaaactagatttaaattccagttgcataatgtacagattaattaaccttgctgagcctgagttttccttatcaacaaacaagagattatctttaccctgctctcaaggcaaggccagagccacttgaaggacattgagcagaagcctgatcaaatgctgatgggtgcttatccaaagggaggctgaaaactagcagaaactgggtgagttaagcaggttggaatagtagatgggcagtaagattggtggtgaagaggccaaatgaacaacctgtaagagggtgtccctgaggaacaggcaaaatcatgcttctttatgtgtaatgtgttaactctactttgtagaggaggctccaaacttaaaggcatcatgacagtctaaacctagaaaataattcccactacctgttagagttgaatagtaagctcttaacattgcatcctatcaggtggatgcaactgcaatttgttccattgtgattgataactttgattacccaattaatgtatttgctaagattgtccattgtaaaattatttctccaaggaacctagtccttttaatggagaatagcatttagaaactataatctggatggaatgctttagaaaccaaggtctgggtgctaaaaatgctaatcaccatgggactgtcactgttccc

SEQ ID NO: 3 - DNA, 5889 bp, Homo sapiens
tcctaggcggcggccgcggcggcggaggcagcagcggcggcggcagtggcggcggcgaaggtggcggcggctcggccagtactcccggcccccgccatttcggactgggagcgagcgcggcgcaggcactgaaggcggcggcggggccagaggctcagcggctcccaggtgcgggagagaggcctgctgaaaatgactgaatataaacttgtggtagttggagctggtggcgtaggcaagagtgccttgacgatacagctaattcagaatcattttgtggacgaatatgatccaacaatagaggattcctacaggaagcaagtagtaattgatggagaaacctgtctcttggatattctcgacacagcaggtcaagaggagtacagtgcaatgagggaccagtacatgaggactggggagggctttctttgtgtatttgccataaataatactaaatcatttgaagatattcaccattatagagaacaaattaaaagagttaaggactctgaagatgtacctatggtcctagtaggaaataaatgtgatttgccttctagaacagtagacacaaaacaggctcaggacttagcaagaagttatggaattccttttattgaaacatcagcaaagacaagacagagagtggaggatgctttttatacattggtgagggagatccgacaatacagattgaaaaaaatcagcaaagaagaaaagactcctggctgtgtgaaaattaaaaaatgcattataatgtaatctgggtgttgatgatgccttctatacattagttcgagaaattcgaaaacataaagaaaagatgagcaaagatggtaaaaagaagaaaaagaagtcaaagacaaagtgtgtaattatgtaaatacaatttgtacttttttcttaaggcatactagtacaagtggtaatttttgtacattacactaaattattagcatttgttttagcattacctaatttttttcctgctccatgcagactgttagcttttaccttaaatgcttattttaaaatgacagtggaagtttttttttcctctaagtgccagtattcccagagttttggtttttgaactagcaatgcctgtgaaaaagaaactgaatacctaagatttctgtcttggggtttttggtgcatgcagttgattacttcttatttttcttaccaattgtgaatgttggtgtgaaacaaattaatgaagcttttgaatcatccctattctgtgttttatctagtcacataaatggattaattactaatttcagttgagaccttctaattggtttttactgaaacattgagggaacacaaatttatgggcttcctgatgatgattcttctaggcatcatgtcctatagtttgtcatccctgatgaatgtaaagttacactgttcacaaaggttttgtctcctttccactgctattagtcatggtcactctccccaaaatattatattttttctataaaaagaaaaaaatggaaaaaaattacaaggcaatggaaactattataaggccatttccttttcacattagataaattactataaagactcctaatagcttttcctgttaaggcagacccagtatgaaatggggattattatagcaaccattttggggctatatttacatgctactaaatttttataataattgaaaagattttaacaagtataaaaaattctcataggaattaaatgtagtctccctgtgtcagactgctctttcatagtataactttaaatcttttcttcaacttgagtctttgaagatagttttaattctgcttgtgacattaaaagattatttgggccagttatagcttattaggtgttgaagagaccaaggttgcaaggccaggccctgtgtgaacctttgagctttcatagagagtttcacagcatggactgtgtccccacggtcatccagtgttgtcatgcattggttagtcaaaatggggagggactagggcagtttggatagctcaacaagatacaatctcactctgtggtggtcctgctgacaaatcaagagcattgcttttgtttcttaagaaaacaaactcttttttaaaaattacttttaaatattaactcaaaagttgagattttggggtggtggtgtgccaagacattaattttttttttaaacaatgaagtgaaaaagttttacaatctctaggtttggctagttctcttaacactggttaaattaacattgcataaacacttttcaagtctgatccatatttaataatgctttaaaataaaaataaaaacaatccttttgataaatttaaaatgttacttattttaaaataaatgaagtgagatggcatggtgaggtgaaagtatcactggactaggaagaaggtgacttaggttctagataggtgtcttttaggactctgattttgaggacatcacttactatccatttcttcatgttaaaagaagtcatctcaaactcttagttttttttttttacaactatgtaatttatattccatttacataaggatacacttatttgtcaagctcagcacaatctgtaaatttttaacctatgttacaccatcttcagtgccagtcttgggcaaaattgtgcaagaggtgaagtttatatttgaatatccattctcgttttaggactcttcttccatattagtgtcatcttgcctccctaccttccacatgccccatgacttgatgcagttttaatacttgtaattcccctaaccataagatttactgctgctgtggatatctccatgaagttttcccactgagtcacatcagaaatgccctacatcttatttcctcagggctcaagagaatctgacagataccataaagggatttgacctaatcactaattttcaggtggtggctgatgctttgaacatctctttgctgcccaatccattagcgacagtaggatttttcaaacctggtatgaatagacagaaccctatccagtggaaggagaatttaataaagatagtgctgaaagaattccttaggtaatctataactaggactactcctggtaacagtaatacattccattgttttagtaaccagaaatcttcatgcaatgaaaaatactttaattcatgaagcttactttttttttttggtgtcagagtctcgctcttgtcacccaggctggaatgcagtggcgccatctcagctcactgcaacctccatctcccaggttcaagcgattctcgtgcctcggcctcctgagtagctgggattacaggcgtgtgccactacactcaactaatttttgtatttttaggagagacggggtttcaccctgttggccaggctggtctcgaactcctgacctcaagtgattcacccaccttggcctcataaacctgttttgcagaactcatttattcagcaaatatttattgagtgcctaccagatgccagtcaccgcacaaggcactgggtatatggtatccccaaacaagagacataatcccggtccttaggtagtgctagtgtggtctgtaatatcttactaaggcctttggtatacgacccagagataacacgatgcgtattttagttttgcaaagaaggggtttggtctctgtgccagctctataattgttttgctacgattccactgaaactcttcgatcaagctactttatgtaaatcacttcattgttttaaaggaataaacttgattatattgtttttttatttggcataactgtgattcttttaggacaattactgtacacattaaggtgtatgtcagatattcatattgacccaaatgtgtaatattccagttttctctgcataagtaattaaaatatacttaaaaattaatagttttatctgggtacaaataaacaggtgcctgaactagttcacagacaaggaaacttctatgtaaaaatcactatgatttctgaattgctatgtgaaactacagatctttggaacactgtttaggtagggtgttaagacttacacagtacctcgtttctacacagagaaagaaatggccatacttcaggaactgcagtgcttatgaggggatatttaggcctcttgaatttttgatgtagatgggcatttttttaaggtagtggttaattacctttatgtgaactttgaatggtttaacaaaagatttgtttttgtagagattttaaagggggagaattctagaaataaatgttacctaattattacagccttaaagacaaaaatccttgttgaagtttttttaaaaaaagctaaattacatagacttaggcattaacatgtttgtggaagaatatagcagacgtatattgtatcatttgagtgaatgttcccaagtaggcattctaggctctatttaactgagtcacactgcataggaatttagaacctaacttttataggttatcaaaactgttgtcaccattgcacaattttgtcctaatatatacatagaaactttgtggggcatgttaagttacagtttgcacaagttcatctcatttgtattccattgattttttttttcttctaaacattttttcttcaaacagtatataactttttttaggggatttttttttagacagcaaaaactatctgaagatttccatttgtcaaaaagtaatgatttcttgataattgtgtagtaatgttttttagaacccagcagttaccttaaagctgaatttatatttagtaacttctgtgttaatactggatagcatgaattctgcattgagaaactgaatagctgtcataaaatgaaactttctttctaaagaaagatactcacatgagttcttgaagaatagtcataactagattaagatctgtgttttagtttaatagtttgaagtgcctgtttgggataatgataggtaatttagatgaatttaggggaaaaaaaagttatctgcagatatgttgagggcccatctctccccccacacccccacagagctaactgggttacagtgttttatccgaaagtttccaattccactgtcttgtgttttcatgttgaaaatacttttgcatttttcctttgagtgccaatttcttactagtactatttcttaatgtaacatgtttacctggaatgtattttaactatttttgtatagtgtaaactgaaacatgcacattttgtacattgtgctttcttttgtgggacatatgcagtgtgatccagttgttttccatcatttggttgcgctgacctaggaatgttggtcatatcaaacattaaaaatgaccactcttttaattgaaattaacttttaaatgtttataggagtatgtgctgtgaagtgatctaaaatttgtaatatttttgtcatgaactgtactactcctaattattgtaatgtaataaaaatagttacagtgactatgagtgtgtatttattcatgaaatttgaactgtttgccccgaaatggatatggaatactttataagccatagacactatagtataccagtgaatcttttatgcagcttgttagaagtatcctttatttctaaaaggtgctgtggatattatgtaaaggcgtgtttgcttaaacttaaaaccatatttagaagtagatgcaaaacaaatctgcctttatgacaaaaaaataggataacattatttatttatttccttttatcaaagaaggtaattgatacacaacaggtgacttggttttaggcccaaaggtagcagcagcaacattaataatggaaataattgaatagttagttatgtatgttaatgccagtcaccagcaggctatttcaaggtcagaagtaatgactccatacatattatttatttctataactacatttaaatcattaccagg

SEQ ID NO: 4 - DNA, 17 bp, Artificial Sequence
  Primer
cccaggtgcgggagaga

SEQ ID NO: 5 - DNA, 23 bp, Artificial Sequence
  Primer
gctgtatcgtcaaggcactcttg

SEQ ID NO: 6 - DNA, 28 bp, Artificial Sequence
  Probe
cttgtggtagttggagctggtggcgtag

SEQ ID NO: 7 - DNA, 23 bp, Artificial Sequence
  Primer
gacacaaaacaggctcaggactt

SEQ ID NO: 8 - DNA, 26 bp, Artificial Sequence
  Primer
tcttgtctttgctgatgtttcaataa

SEQ ID NO: 9 - DNA, 18 bp, Artificial Sequence
  Probe
aagaagttatggaattcc

SEQ ID NO: 10 - DNA, 29 bp, Artificial Sequence
  Primer
caagtagtaattgatggagaaacctgtct

SEQ ID NO: 11 - DNA, 22 bp, Artificial Sequence
  Primer
ctggtccctcattgcactgtac

SEQ ID NO: 12 - DNA, 30 bp, Artificial Sequence
  Probe
tggatattctcgacacagcaggtcaagagg

SEQ ID NO: 13 - DNA, 16 bp, Artificial Sequence
  Synthetic oligonucleotide
acccagattacattat

SEQ ID NO: 14 - DNA, 16 bp, Artificial Sequence
  Synthetic oligonucleotide
tcgaatttctcgaact

SEQ ID NO: 15 - DNA, 16 bp, Artificial Sequence
  Synthetic oligonucleotide
gctaaaacaaatgcta

SEQ ID NO: 16 - DNA, 16 bp, Artificial Sequence
  Synthetic oligonucleotide
cgagaatatccaagag

SEQ ID NO: 17 - DNA, 16 bp, Artificial Sequence
  Synthetic oligonucleotide
cctgctgtgtcgagaa

SEQ ID NO: 18 - DNA, 16 bp, Artificial Sequence
  Synthetic oligonucleotide
gacctgctgtgtcgag

SEQ ID NO: 19 - DNA, 16 bp, Artificial Sequence
  Synthetic oligonucleotide
tataatggtgaatatc

SEQ ID NO: 20 - DNA, 16 bp, Artificial Sequence
  Synthetic oligonucleotide
atttgttctctataat

SEQ ID NO: 21 - DNA, 16 bp, Artificial Sequence
  Synthetic oligonucleotide
aacttcttgctaagtc

SEQ ID NO: 22 - DNA, 16 bp, Artificial Sequence
  Synthetic oligonucleotide
gaactaatgtatagaa

SEQ ID NO: 23 - DNA, 16 bp, Artificial Sequence
  Synthetic oligonucleotide
taccacttgtactagt

SEQ ID NO: 24 - DNA, 16 bp, Artificial Sequence
  Synthetic oligonucleotide
ctaacagtctgcatgg

SEQ ID NO: 25 - DNA, 16 bp, Artificial Sequence
  Synthetic oligonucleotide
aatactggcacttaga

SEQ ID NO: 26 - DNA, 16 bp, Artificial Sequence
  Synthetic oligonucleotide
tgtttcacaccaacat

SEQ ID NO: 27 - DNA, 16 bp, Artificial Sequence
  Synthetic oligonucleotide
tgcctagaagaatcat

SEQ ID NO: 28 - DNA, 16 bp, Artificial Sequence
  Synthetic oligonucleotide
gacaaaacctttgtga

SEQ ID NO: 29 - DNA, 16 bp, Artificial Sequence
  Synthetic oligonucleotide
ccatgactaatagcag

SEQ ID NO: 30 - DNA, 16 bp, Artificial Sequence
  Synthetic oligonucleotide
atactgggtctgcctt

SEQ ID NO: 31 - DNA, 16 bp, Artificial Sequence
  Synthetic oligonucleotide
gccccaaaatggttgc

SEQ ID NO: 32 - DNA, 16 bp, Artificial Sequence
  Synthetic oligonucleotide
ttagtagcatgtaaat

SEQ ID NO: 33 - DNA, 16 bp, Artificial Sequence
  Synthetic oligonucleotide
gaaaagatttaaagtt

SEQ ID NO: 34 - DNA, 16 bp, Artificial Sequence
  Synthetic oligonucleotide
gctataactggcccaa

SEQ ID NO: 35 - DNA, 16 bp, Artificial Sequence
  Synthetic oligonucleotide
accacagagtgagatt

SEQ ID NO: 36 - DNA, 16 bp, Artificial Sequence
  Synthetic oligonucleotide
gttaatttaaccagtg

SEQ ID NO: 37 - DNA, 16 bp, Artificial Sequence
  Synthetic oligonucleotide
tgccatctcacttcat

SEQ ID NO: 38 - DNA, 16 bp, Artificial Sequence
  Synthetic oligonucleotide
tagtaagtgatgtcct

SEQ ID NO: 39 - DNA, 16 bp, Artificial Sequence
  Synthetic oligonucleotide
gtgtaacataggttaa

SEQ ID NO: 40 - DNA, 16 bp, Artificial Sequence
  Synthetic oligonucleotide
caattttgcccaagac

SEQ ID NO: 41 - DNA, 16 bp, Artificial Sequence
  Synthetic oligonucleotide
gaagagtcctaaaacg

SEQ ID NO: 42 - DNA, 16 bp, Artificial Sequence
  Synthetic oligonucleotide
tagggaggcaagatga

SEQ ID NO: 43 - DNA, 16 bp, Artificial Sequence
  Synthetic oligonucleotide
tgcatcaagtcatggg

SEQ ID NO: 44 - DNA, 16 bp, Artificial Sequence
  Synthetic oligonucleotide
tagggcatttctgatg

SEQ ID NO: 45 - DNA, 16 bp, Artificial Sequence
  Synthetic oligonucleotide
gagatgttcaaagcat

SEQ ID NO: 46 - DNA, 16 bp, Artificial Sequence
  Synthetic oligonucleotide
gtcgctaatggattgg

SEQ ID NO: 47 - DNA, 16 bp, Artificial Sequence
  Synthetic oligonucleotide
taaattctccttccac

SEQ ID NO: 48 - DNA, 16 bp, Artificial Sequence
  Synthetic oligonucleotide
acaatggaatgtatta

SEQ ID NO: 49 - DNA, 16 bp, Artificial Sequence
  Synthetic oligonucleotide
cggtgactggcatctg

SEQ ID NO: 50 - DNA, 16 bp, Artificial Sequence
  Synthetic oligonucleotide
aggaccgggattatgt

SEQ ID NO: 51 - DNA, 16 bp, Artificial Sequence
  Synthetic oligonucleotide
ggccttagtaagatat

SEQ ID NO: 52 - DNA, 16 bp, Artificial Sequence
  Synthetic oligonucleotide
tgaatatctgacatac

SEQ ID NO: 53 - DNA, 16 bp, Artificial Sequence
  Synthetic oligonucleotide
ctagttcaggcacctg

SEQ ID NO: 54 - DNA, 16 bp, Artificial Sequence
  Synthetic oligonucleotide
cctacctaaacagtgt

SEQ ID NO: 55 - DNA, 16 bp, Artificial Sequence
  Synthetic oligonucleotide
cgaggtactgtgtaag

SEQ ID NO: 56 - DNA, 16 bp, Artificial Sequence
  Synthetic oligonucleotide
agtatggccatttctt

SEQ ID NO: 57 - DNA, 16 bp, Artificial Sequence
  Synthetic oligonucleotide
atcccctcataagcac

SEQ ID NO: 58 - DNA, 16 bp, Artificial Sequence
  Synthetic oligonucleotide
aataattaggtaacat

SEQ ID NO: 59 - DNA, 16 bp, Artificial Sequence
  Synthetic oligonucleotide
gtctgctatattcttc

SEQ ID NO: 60 - DNA, 16 bp, Artificial Sequence
  Synthetic oligonucleotide
tacttgggaacattca

SEQ ID NO: 61 - DNA, 16 bp, Artificial Sequence
  Synthetic oligonucleotide
tgcagtgtgactcagt

SEQ ID NO: 62 - DNA, 16 bp, Artificial Sequence
  Synthetic oligonucleotide
tatgcagtgtgactca

SEQ ID NO: 63 - DNA, 16 bp, Artificial Sequence
  Synthetic oligonucleotide
aattcctatgcagtgt

SEQ ID NO: 64 - DNA, 16 bp, Artificial Sequence
  Synthetic oligonucleotide
taggacaaaattgtgc

SEQ ID NO: 65 - DNA, 16 bp, Artificial Sequence
  Synthetic oligonucleotide
cacaaagtttctatgt

SEQ ID NO: 66 - DNA, 16 bp, Artificial Sequence
  Synthetic oligonucleotide
atcattactttttgac

SEQ ID NO: 67 - DNA, 16 bp, Artificial Sequence
  Synthetic oligonucleotide
aaggtaactgctgggt

SEQ ID NO: 68 - DNA, 16 bp, Artificial Sequence
  Synthetic oligonucleotide
ctcaatgcagaattca

SEQ ID NO: 69 - DNA, 16 bp, Artificial Sequence
  Synthetic oligonucleotide
acccagttagctctgt

SEQ ID NO: 70 - DNA, 16 bp, Artificial Sequence
  Synthetic oligonucleotide
agacagtggaattgga

SEQ ID NO: 71 - DNA, 16 bp, Artificial Sequence
  Synthetic oligonucleotide
aagaaattggcactca

SEQ ID NO: 72 - DNA, 16 bp, Artificial Sequence
  Synthetic oligonucleotide
gtaagaaattggcact

SEQ ID NO: 73 - DNA, 16 bp, Artificial Sequence
  Synthetic oligonucleotide
aggtaaacatgttaca

SEQ ID NO: 74 - DNA, 16 bp, Artificial Sequence
  Synthetic oligonucleotide
tcacactgcatatgtc

SEQ ID NO: 75 - DNA, 16 bp, Artificial Sequence
  Synthetic oligonucleotide
gatcacactgcatatg

SEQ ID NO: 76 - DNA, 16 bp, Artificial Sequence
  Synthetic oligonucleotide
gcccttacttatatgc

SEQ ID NO: 77 - DNA, 16 bp, Artificial Sequence
  Synthetic oligonucleotide
atcttgcccactgttt

SEQ ID NO: 78 - DNA, 16 bp, Artificial Sequence
  Synthetic oligonucleotide
agtctggattattaca

SEQ ID NO: 79 - DNA, 16 bp, Artificial Sequence
  Synthetic oligonucleotide
ggagaaacacagtctg

SEQ ID NO: 80 - DNA, 16 bp, Artificial Sequence
  Synthetic oligonucleotide
acccacctataatggt

SEQ ID NO: 81 - DNA, 16 bp, Artificial Sequence
  Synthetic oligonucleotide
gaagccaataattaaa

SEQ ID NO: 82 - DNA, 16 bp, Artificial Sequence
  Synthetic oligonucleotide
gagagaattggaagcc

SEQ ID NO: 83 - DNA, 16 bp, Artificial Sequence
  Synthetic oligonucleotide
ttaaagctggtatatt

SEQ ID NO: 84 - DNA, 16 bp, Artificial Sequence
  Synthetic oligonucleotide
cagccaggagtctttt

SEQ ID NO: 85 - DNA, 16 bp, Artificial Sequence
  Synthetic oligonucleotide
tcaacaccctgaaata

SEQ ID NO: 86 - DNA, 16 bp, Artificial Sequence
  Synthetic oligonucleotide
tccctcaccaatgtat

SEQ ID NO: 87 - DNA, 16 bp, Artificial Sequence
  Synthetic oligonucleotide
tcaacacccagattac

SEQ ID NO: 88 - DNA, 16 bp, Artificial Sequence
  Synthetic oligonucleotide
gttttcgaatttctcg

SEQ ID NO: 89 - DNA, 16 bp, Artificial Sequence
  Synthetic oligonucleotide
aatgctcttgatttgt

SEQ ID NO: 90 - DNA, 16 bp, Artificial Sequence
  Synthetic oligonucleotide
tgtgtcgagaatatcc

SEQ ID NO: 91 - DNA, 16 bp, Artificial Sequence
  Synthetic oligonucleotide
acctgctgtgtcgaga

SEQ ID NO: 92 - DNA, 16 bp, Artificial Sequence
  Synthetic oligonucleotide
tgacctgctgtgtcga

SEQ ID NO: 93 - DNA, 16 bp, Artificial Sequence
  Synthetic oligonucleotide
ttctctataatggtga

SEQ ID NO: 94 - DNA, 16 bp, Artificial Sequence
  Synthetic oligonucleotide
agagtccttaactctt

SEQ ID NO: 95 - DNA, 16 bp, Artificial Sequence
  Synthetic oligonucleotide
taaaaggaattccata

SEQ ID NO: 96 - DNA, 16 bp, Artificial Sequence
  Synthetic oligonucleotide
tagtatgccttaagaa

SEQ ID NO: 97 - DNA, 16 bp, Artificial Sequence
  Synthetic oligonucleotide
tttagtgtaatgtaca

SEQ ID NO: 98 - DNA, 16 bp, Artificial Sequence
  Synthetic oligonucleotide
atactggcacttagag

SEQ ID NO: 99 - DNA, 16 bp, Artificial Sequence
  Synthetic oligonucleotide
aaatcttaggtattca

SEQ ID NO: 100 - DNA, 16 bp, Artificial Sequence
  Synthetic oligonucleotide
gatgattcaaaagctt

SEQ ID NO: 101 - DNA, 16 bp, Artificial Sequence
  Synthetic oligonucleotide
tataggacatgatgcc

SEQ ID NO: 102 - DNA, 16 bp, Artificial Sequence
  Synthetic oligonucleotide
gcagtggaaaggagac

SEQ ID NO: 103 - DNA, 16 bp, Artificial Sequence
  Synthetic oligonucleotide
gccttaacaggaaaag

SEQ ID NO: 104 - DNA, 16 bp, Artificial Sequence
  Synthetic oligonucleotide
aataatccccatttca

SEQ ID NO: 105 - DNA, 16 bp, Artificial Sequence
  Synthetic oligonucleotide
gcatgtaaatatagcc

SEQ ID NO: 106 - DNA, 16 bp, Artificial Sequence
  Synthetic oligonucleotide
agtctgacacagggag

SEQ ID NO: 107 - DNA, 16 bp, Artificial Sequence
  Synthetic oligonucleotide
gtcacaagcagaatta

SEQ ID NO: 108 - DNA, 16 bp, Artificial Sequence
  Synthetic oligonucleotide
ttttgactaaccaatg

SEQ ID NO: 109 - DNA, 16 bp, Artificial Sequence
  Synthetic oligonucleotide
gtcagcaggaccacca

SEQ ID NO: 110 - DNA, 16 bp, Artificial Sequence
  Synthetic oligonucleotide
tggatcagacttgaaa

SEQ ID NO: 111 - DNA, 16 bp, Artificial Sequence
  Synthetic oligonucleotide
gtcaccttcttcctag

SEQ ID NO: 112 - DNA, 16 bp, Artificial Sequence
  Synthetic oligonucleotide
tttacagattgtgctg

SEQ ID NO: 113 - DNA, 16 bp, Artificial Sequence
  Synthetic oligonucleotide
ttgcccaagactggca

SEQ ID NO: 114 - DNA, 16 bp, Artificial Sequence
  Synthetic oligonucleotide
tcacctcttgcacaat

SEQ ID NO: 115 - DNA, 16 bp, Artificial Sequence
  Synthetic oligonucleotide
acactaatatggaaga

SEQ ID NO: 116 - DNA, 16 bp, Artificial Sequence
  Synthetic oligonucleotide
gcatgtggaaggtagg

SEQ ID NO: 117 - DNA, 16 bp, Artificial Sequence
  Synthetic oligonucleotide
atgtgactcagtggga

SEQ ID NO: 118 - DNA, 16 bp, Artificial Sequence
  Synthetic oligonucleotide
tatggtatctgtcaga

SEQ ID NO: 119 - DNA, 16 bp, Artificial Sequence
  Synthetic oligonucleotide
ttgggcagcaaagaga

SEQ ID NO: 120 - DNA, 16 bp, Artificial Sequence
  Synthetic oligonucleotide
ctattcataccaggtt

SEQ ID NO: 121 - DNA, 16 bp, Artificial Sequence
  Synthetic oligonucleotide
ttactgttaccaggag

SEQ ID NO: 122 - DNA, 16 bp, Artificial Sequence
  Synthetic oligonucleotide
gcatgaagatttctgg

SEQ ID NO: 123 - DNA, 16 bp, Artificial Sequence
  Synthetic oligonucleotide
atgtctcttgtttggg

SEQ ID NO: 124 - DNA, 16 bp, Artificial Sequence
  Synthetic oligonucleotide
atattacagaccacac

SEQ ID NO: 125 - DNA, 16 bp, Artificial Sequence
  Synthetic oligonucleotide
gaatcacagttatgcc

SEQ ID NO: 126 - DNA, 16 bp, Artificial Sequence
  Synthetic oligonucleotide
acatttgggtcaatat

SEQ ID NO: 127 - DNA, 16 bp, Artificial Sequence
  Synthetic oligonucleotide
atagcaattcagaaat

SEQ ID NO: 128 - DNA, 16 bp, Artificial Sequence
  Synthetic oligonucleotide
aagtcttaacacccta

SEQ ID NO: 129 - DNA, 16 bp, Artificial Sequence
  Synthetic oligonucleotide
tctgtgtagaaacgag

SEQ ID NO: 130 - DNA, 16 bp, Artificial Sequence
  Synthetic oligonucleotide
gcactgcagttcctga

SEQ ID NO: 131 - DNA, 16 bp, Artificial Sequence
  Synthetic oligonucleotide
taattaaccactacct

SEQ ID NO: 132 - DNA, 16 bp, Artificial Sequence
  Synthetic oligonucleotide
tctatgtaatttagct

SEQ ID NO: 133 - DNA, 16 bp, Artificial Sequence
  Synthetic oligonucleotide
aatgatacaatatacg

SEQ ID NO: 134 - DNA, 16 bp, Artificial Sequence
  Synthetic oligonucleotide
ttaaatagagcctaga

SEQ ID NO: 135 - DNA, 16 bp, Artificial Sequence
  Synthetic oligonucleotide
atgcagtgtgactcag

SEQ ID NO: 136 - DNA, 16 bp, Artificial Sequence
  Synthetic oligonucleotide
ctatgcagtgtgactc

SEQ ID NO: 137 - DNA, 16 bp, Artificial Sequence
  Synthetic oligonucleotide
caaaattgtgcaatgg

SEQ ID NO: 138 - DNA, 16 bp, Artificial Sequence
  Synthetic oligonucleotide
gtatatattaggacaa

SEQ ID NO: 139 - DNA, 16 bp, Artificial Sequence
  Synthetic oligonucleotide
tactgtttgaagaaaa

SEQ ID NO: 140 - DNA, 16 bp, Artificial Sequence
  Synthetic oligonucleotide
cacaattatcaagaaa

SEQ ID NO: 141 - DNA, 16 bp, Artificial Sequence
  Synthetic oligonucleotide
tcaatgcagaattcat

SEQ ID NO: 142 - DNA, 16 bp, Artificial Sequence
  Synthetic oligonucleotide
agctattcagtttctc

SEQ ID NO: 143 - DNA, 16 bp, Artificial Sequence
  Synthetic oligonucleotide
ggataaaacactgtaa

SEQ ID NO: 144 - DNA, 16 bp, Artificial Sequence
  Synthetic oligonucleotide
ggcactcaaaggaaaa

SEQ ID NO: 145 - DNA, 16 bp, Artificial Sequence
  Synthetic oligonucleotide
taagaaattggcactc

SEQ ID NO: 146 - DNA, 16 bp, Artificial Sequence
  Synthetic oligonucleotide
aacatgttacattaag

SEQ ID NO: 147 - DNA, 16 bp, Artificial Sequence
  Synthetic oligonucleotide
tacattccaggtaaac

SEQ ID NO: 148 - DNA, 16 bp, Artificial Sequence
  Synthetic oligonucleotide
atcacactgcatatgt

SEQ ID NO: 149 - DNA, 16 bp, Artificial Sequence
  Synthetic oligonucleotide
acattcctaggtcagc

SEQ ID NO: 150 - DNA, 16 bp, Artificial Sequence
  Synthetic oligonucleotide
aaacttccttttacat

SEQ ID NO: 151 - DNA, 16 bp, Artificial Sequence
  Synthetic oligonucleotide
tactgagcccttactt

SEQ ID NO: 152 - DNA, 16 bp, Artificial Sequence
  Synthetic oligonucleotide
ggattattacagtgca

SEQ ID NO: 153 - DNA, 16 bp, Artificial Sequence
  Synthetic oligonucleotide
aacacagtctggatta

SEQ ID NO: 154 - DNA, 16 bp, Artificial Sequence
  Synthetic oligonucleotide
cctataatggtgaata

SEQ ID NO: 155 - DNA, 16 bp, Artificial Sequence
  Synthetic oligonucleotide
gataaatgtgaactag

SEQ ID NO: 156 - DNA, 16 bp, Artificial Sequence
  Synthetic oligonucleotide
aattggaagccaataa

SEQ ID NO: 157 - DNA, 16 bp, Artificial Sequence
  Synthetic oligonucleotide
tgtttccagcaatgca

SEQ ID NO: 158 - DNA, 16 bp, Artificial Sequence
  Synthetic oligonucleotide
gcattgtaaaacacaa

SEQ ID NO: 159 - DNA, 16 bp, Artificial Sequence
  Synthetic oligonucleotide
taccagattacattat

SEQ ID NO: 160 - DNA, 16 bp, Artificial Sequence
  Synthetic oligonucleotide
agccgctgagcctctg

SEQ ID NO: 161 - DNA, 16 bp, Artificial Sequence
  Synthetic oligonucleotide
actcttgcctacgcca

SEQ ID NO: 162 - DNA, 16 bp, Artificial Sequence
  Synthetic oligonucleotide
caagagacaggtttct

SEQ ID NO: 163 - DNA, 16 bp, Artificial Sequence
  Synthetic oligonucleotide
gtcgagaatatccaag

SEQ ID NO: 164 - DNA, 16 bp, Artificial Sequence
  Synthetic oligonucleotide
tgctgtgtcgagaata

SEQ ID NO: 165 - DNA, 16 bp, Artificial Sequence
  Synthetic oligonucleotide
tacacaaagaaagccc

SEQ ID NO: 166 - DNA, 16 bp, Artificial Sequence
  Synthetic oligonucleotide
gctcatcttttcttta

SEQ ID NO: 167 - DNA, 16 bp, Artificial Sequence
  Synthetic oligonucleotide
cacttgtactagtatg

SEQ ID NO: 168 - DNA, 16 bp, Artificial Sequence
  Synthetic oligonucleotide
aattaccacttgtact

SEQ ID NO: 169 - DNA, 16 bp, Artificial Sequence
  Synthetic oligonucleotide
atttaaggtaaaagct

SEQ ID NO: 170 - DNA, 16 bp, Artificial Sequence
  Synthetic oligonucleotide
gattcaaaagcttcat

SEQ ID NO: 171 - DNA, 16 bp, Artificial Sequence
  Synthetic oligonucleotide
agggatgattcaaaag

SEQ ID NO: 172 - DNA, 16 bp, Artificial Sequence
  Synthetic oligonucleotide
aaggtctcaactgaaa

SEQ ID NO: 173 - DNA, 16 bp, Artificial Sequence
  Synthetic oligonucleotide
tcagtaaaaaccaatt

SEQ ID NO: 174 - DNA, 16 bp, Artificial Sequence
  Synthetic oligonucleotide
ctcaatgtttcagtaa

SEQ ID NO: 175 - DNA, 16 bp, Artificial Sequence
  Synthetic oligonucleotide
gtggaaaggagacaaa

SEQ ID NO: 176 - DNA, 16 bp, Artificial Sequence
  Synthetic oligonucleotide
tcccagtccgaaatgg

SEQ ID NO: 177 - DNA, 16 bp, Artificial Sequence
  Synthetic oligonucleotide
ccgcacctgggagccg

SEQ ID NO: 178 - DNA, 16 bp, Artificial Sequence
  Synthetic oligonucleotide
agtcattttcagcagg

SEQ ID NO: 179 - DNA, 16 bp, Artificial Sequence
  Synthetic oligonucleotide
aagtttatattcagtc

SEQ ID NO: 180 - DNA, 16 bp, Artificial Sequence
  Synthetic oligonucleotide
aactaccacaagttta

SEQ ID NO: 181 - DNA, 16 bp, Artificial Sequence
  Synthetic oligonucleotide
cgtcaaggcactcttg

SEQ ID NO: 182 - DNA, 16 bp, Artificial Sequence
  Synthetic oligonucleotide
ctgaattagctgtatc

SEQ ID NO: 183 - DNA, 16 bp, Artificial Sequence
  Synthetic oligonucleotide
tactacttgcttcctg

SEQ ID NO: 184 - DNA, 16 bp, Artificial Sequence
  Synthetic oligonucleotide
ctccatcaattactac

SEQ ID NO: 185 - DNA, 16 bp, Artificial Sequence
  Synthetic oligonucleotide
tagtattatttatggc

SEQ ID NO: 186 - DNA, 16 bp, Artificial Sequence
  Synthetic oligonucleotide
caaatgatttagtatt

SEQ ID NO: 187 - DNA, 16 bp, Artificial Sequence
  Synthetic oligonucleotide
gaatatcttcaaatga

SEQ ID NO: 188 - DNA, 16 bp, Artificial Sequence
  Synthetic oligonucleotide
actcttttaatttgtt

SEQ ID NO: 189 - DNA, 16 bp, Artificial Sequence
  Synthetic oligonucleotide
tttatttcctactagg

SEQ ID NO: 190 - DNA, 16 bp, Artificial Sequence
  Synthetic oligonucleotide
aggcaaatcacattta

SEQ ID NO: 191 - DNA, 16 bp, Artificial Sequence
  Synthetic oligonucleotide
actgttctagaaggca

SEQ ID NO: 192 - DNA, 16 bp, Artificial Sequence
  Synthetic oligonucleotide
atagaaggcatcatca

SEQ ID NO: 193 - DNA, 16 bp, Artificial Sequence
  Synthetic oligonucleotide
ctttatgttttcgaat

SEQ ID NO: 194 - DNA, 16 bp, Artificial Sequence
  Synthetic oligonucleotide
acactttgtctttgac

SEQ ID NO: 195 - DNA, 16 bp, Artificial Sequence
  Synthetic oligonucleotide
cataattacacacttt

SEQ ID NO: 196 - DNA, 16 bp, Artificial Sequence
  Synthetic oligonucleotide
tacaaattgtatttac

SEQ ID NO: 197 - DNA, 16 bp, Artificial Sequence
  Synthetic oligonucleotide
gccttaagaaaaaagt

SEQ ID NO: 198 - DNA, 16 bp, Artificial Sequence
  Synthetic oligonucleotide
taataatttagtgtaa

SEQ ID NO: 199 - DNA, 16 bp, Artificial Sequence
  Synthetic oligonucleotide
gtaatgctaaaacaaa

SEQ ID NO: 200 - DNA, 16 bp, Artificial Sequence
  Synthetic oligonucleotide
aaaaattaggtaatgc

SEQ ID NO: 201 - DNA, 16 bp, Artificial Sequence
  Synthetic oligonucleotide
ctgcatggagcaggaa

SEQ ID NO: 202 - DNA, 16 bp, Artificial Sequence
  Synthetic oligonucleotide
aaaagctaacagtctg

SEQ ID NO: 203 - DNA, 16 bp, Artificial Sequence
  Synthetic oligonucleotide
cttccactgtcatttt

SEQ ID NO: 204 - DNA, 16 bp, Artificial Sequence
  Synthetic oligonucleotide
gcacttagaggaaaaa

SEQ ID NO: 205 - DNA, 16 bp, Artificial Sequence
  Synthetic oligonucleotide
actctgggaatactgg

SEQ ID NO: 206 - DNA, 16 bp, Artificial Sequence
  Synthetic oligonucleotide
tagttcaaaaaccaaa

SEQ ID NO: 207 - DNA, 16 bp, Artificial Sequence
  Synthetic oligonucleotide
aggcattgctagttca

SEQ ID NO: 208 - DNA, 16 bp, Artificial Sequence
  Synthetic oligonucleotide
ctttttcacaggcatt

SEQ ID NO: 209 - DNA, 16 bp, Artificial Sequence
  Synthetic oligonucleotide
aggtattcagtttctt

SEQ ID NO: 210 - DNA, 16 bp, Artificial Sequence
  Synthetic oligonucleotide
gacagaaatcttaggt

SEQ ID NO: 211 - DNA, 16 bp, Artificial Sequence
  Synthetic oligonucleotide
aaaccccaagacagaa

SEQ ID NO: 212 - DNA, 16 bp, Artificial Sequence
  Synthetic oligonucleotide
atgcaccaaaaacccc

SEQ ID NO: 213 - DNA, 16 bp, Artificial Sequence
  Synthetic oligonucleotide
atcaactgcatgcacc

SEQ ID NO: 214 - DNA, 16 bp, Artificial Sequence
  Synthetic oligonucleotide
taagaagtaatcaact

SEQ ID NO: 215 - DNA, 16 bp, Artificial Sequence
  Synthetic oligonucleotide
acaattggtaagaaaa

SEQ ID NO: 216 - DNA, 16 bp, Artificial Sequence
  Synthetic oligonucleotide
ccaacattcacaattg

SEQ ID NO: 217 - DNA, 16 bp, Artificial Sequence
  Synthetic oligonucleotide
ttaatttgtttcacac

SEQ ID NO: 218 - DNA, 16 bp, Artificial Sequence
  Synthetic oligonucleotide
aaacacagaataggga

SEQ ID NO: 219 - DNA, 16 bp, Artificial Sequence
  Synthetic oligonucleotide
gactagataaaacaca

SEQ ID NO: 220 - DNA, 16 bp, Artificial Sequence
  Synthetic oligonucleotide
catttatgtgactaga

SEQ ID NO: 221 - DNA, 16 bp, Artificial Sequence
  Synthetic oligonucleotide
gtaattaatccattta

SEQ ID NO: 222 - DNA, 16 bp, Artificial Sequence
  Synthetic oligonucleotide
ctgaaattagtaatta

SEQ ID NO: 223 - DNA, 16 bp, Artificial Sequence
  Synthetic oligonucleotide
accaattagaaggtct

SEQ ID NO: 224 - DNA, 16 bp, Artificial Sequence
  Synthetic oligonucleotide
atttgtgttccctcaa

SEQ ID NO: 225 - DNA, 16 bp, Artificial Sequence
  Synthetic oligonucleotide
agcccataaatttgtg

SEQ ID NO: 226 - DNA, 16 bp, Artificial Sequence
  Synthetic oligonucleotide
tcatcaggaagcccat

SEQ ID NO: 227 - DNA, 16 bp, Artificial Sequence
  Synthetic oligonucleotide
gaagaatcatcatcag

SEQ ID NO: 228 - DNA, 16 bp, Artificial Sequence
  Synthetic oligonucleotide
catgatgcctagaaga

SEQ ID NO: 229 - DNA, 16 bp, Artificial Sequence
  Synthetic oligonucleotide
caaactataggacatg

SEQ ID NO: 230 - DNA, 16 bp, Artificial Sequence
  Synthetic oligonucleotide
cagggatgacaaacta

SEQ ID NO: 231 - DNA, 16 bp, Artificial Sequence
  Synthetic oligonucleotide
ttacattcatcaggga

SEQ ID NO: 232 - DNA, 16 bp, Artificial Sequence
  Synthetic oligonucleotide
agtgtaactttacatt

SEQ ID NO: 233 - DNA, 16 bp, Artificial Sequence
  Synthetic oligonucleotide
ctttgtgaacagtgta

SEQ ID NO: 234 - DNA, 16 bp, Artificial Sequence
  Synthetic oligonucleotide
aaggagacaaaacctt

SEQ ID NO: 235 - DNA, 16 bp, Artificial Sequence
  Synthetic oligonucleotide
agcagtggaaaggaga

SEQ ID NO: 236 - DNA, 16 bp, Artificial Sequence
  Synthetic oligonucleotide
atagcagtggaaagga

SEQ ID NO: 237 - DNA, 16 bp, Artificial Sequence
  Synthetic oligonucleotide
taatagcagtggaaag

SEQ ID NO: 238 - DNA, 16 bp, Artificial Sequence
  Synthetic oligonucleotide
actaatagcagtggaa

SEQ ID NO: 239 - DNA, 16 bp, Artificial Sequence
  Synthetic oligonucleotide
tgactaatagcagtgg

SEQ ID NO: 240 - DNA, 16 bp, Artificial Sequence
  Synthetic oligonucleotide
catgactaatagcagt

SEQ ID NO: 241 - DNA, 16 bp, Artificial Sequence
  Synthetic oligonucleotide
tgaccatgactaatag

SEQ ID NO: 242 - DNA, 16 bp, Artificial Sequence
  Synthetic oligonucleotide
agtgaccatgactaat

SEQ ID NO: 243 - DNA, 16 bp, Artificial Sequence
  Synthetic oligonucleotide
cttataatagtttcca

SEQ ID NO: 244 - DNA, 16 bp, Artificial Sequence
  Synthetic oligonucleotide
ctgggtctgccttaac

SEQ ID NO: 245 - DNA, 16 bp, Artificial Sequence
  Synthetic oligonucleotide
ttcatactgggtctgc

SEQ ID NO: 246 - DNA, 16 bp, Artificial Sequence
  Synthetic oligonucleotide
gacacagggagactac

SEQ ID NO: 247 - DNA, 16 bp, Artificial Sequence
  Synthetic oligonucleotide
ctgacacagggagact

SEQ ID NO: 248 - DNA, 16 bp, Artificial Sequence
  Synthetic oligonucleotide
agcagtctgacacagg

SEQ ID NO: 249 - DNA, 16 bp, Artificial Sequence
  Synthetic oligonucleotide
aactggcccaaataat

SEQ ID NO: 250 - DNA, 16 bp, Artificial Sequence
  Synthetic oligonucleotide
ataactggcccaaata

SEQ ID NO: 251 - DNA, 16 bp, Artificial Sequence
  Synthetic oligonucleotide
ctataactggcccaaa

SEQ ID NO: 252 - DNA, 16 bp, Artificial Sequence
  Synthetic oligonucleotide
agctataactggccca

SEQ ID NO: 253 - DNA, 16 bp, Artificial Sequence
  Synthetic oligonucleotide
taagctataactggcc

SEQ ID NO: 254 - DNA, 16 bp, Artificial Sequence
  Synthetic oligonucleotide
aataagctataactgg

SEQ ID NO: 255 - DNA, 16 bp, Artificial Sequence
  Synthetic oligonucleotide
actggatgaccgtggg

SEQ ID NO: 256 - DNA, 16 bp, Artificial Sequence
  Synthetic oligonucleotide
ccacagagtgagattg

SEQ ID NO: 257 - DNA, 16 bp, Artificial Sequence
  Synthetic oligonucleotide
caccacagagtgagat

SEQ ID NO: 258 - DNA, 16 bp, Artificial Sequence
  Synthetic oligonucleotide
accaccacagagtgag

SEQ ID NO: 259 - DNA, 16 bp, Artificial Sequence
  Synthetic oligonucleotide
ggaccaccacagagtg

SEQ ID NO: 260 - DNA, 16 bp, Artificial Sequence
  Synthetic oligonucleotide
agcaggaccaccacag

SEQ ID NO: 261 - DNA, 16 bp, Artificial Sequence
  Synthetic oligonucleotide
tttgtcagcaggacca

SEQ ID NO: 262 - DNA, 16 bp, Artificial Sequence
  Synthetic oligonucleotide
gctcttgatttgtcag

SEQ ID NO: 263 - DNA, 16 bp, Artificial Sequence
  Synthetic oligonucleotide
agcaatgctcttgatt

SEQ ID NO: 264 - DNA, 16 bp, Artificial Sequence
  Synthetic oligonucleotide
aaagcaatgctcttga

SEQ ID NO: 265 - DNA, 16 bp, Artificial Sequence
  Synthetic oligonucleotide
atgtcttggcacacca

SEQ ID NO: 266 - DNA, 16 bp, Artificial Sequence
  Synthetic oligonucleotide
aatataatattttggg

SEQ ID NO: 267 - DNA, 16 bp, Artificial Sequence
  Synthetic oligonucleotide
ttccattgccttgtaa

SEQ ID NO: 268 - DNA, 16 bp, Artificial Sequence
  Synthetic oligonucleotide
aggaaatggccttata

SEQ ID NO: 269 - DNA, 16 bp, Artificial Sequence
  Synthetic oligonucleotide
ctaatgtgaaaaggaa

SEQ ID NO: 270 - DNA, 16 bp, Artificial Sequence
  Synthetic oligonucleotide
agtaatttatctaatg

SEQ ID NO: 271 - DNA, 16 bp, Artificial Sequence
  Synthetic oligonucleotide
agtctttatagtaatt

SEQ ID NO: 272 - DNA, 16 bp, Artificial Sequence
  Synthetic oligonucleotide
gctattaggagtcttt

SEQ ID NO: 273 - DNA, 16 bp, Artificial Sequence
  Synthetic oligonucleotide
acaggaaaagctatta

SEQ ID NO: 274 - DNA, 16 bp, Artificial Sequence
  Synthetic oligonucleotide
cccatttcatactggg

SEQ ID NO: 275 - DNA, 16 bp, Artificial Sequence
  Synthetic oligonucleotide
gctataataatcccca

SEQ ID NO: 276 - DNA, 16 bp, Artificial Sequence
  Synthetic oligonucleotide
aaaatggttgctataa

SEQ ID NO: 277 - DNA, 16 bp, Artificial Sequence
  Synthetic oligonucleotide
aatatagccccaaaat

SEQ ID NO: 278 - DNA, 16 bp, Artificial Sequence
  Synthetic oligonucleotide
aaaatttagtagcatg

SEQ ID NO: 279 - DNA, 16 bp, Artificial Sequence
  Synthetic oligonucleotide
atacttgttaaaatct

SEQ ID NO: 280 - DNA, 16 bp, Artificial Sequence
  Synthetic oligonucleotide
gaattttttatacttg

SEQ ID NO: 281 - DNA, 16 bp, Artificial Sequence
  Synthetic oligonucleotide
ttcctatgagaatttt

SEQ ID NO: 282 - DNA, 16 bp, Artificial Sequence
  Synthetic oligonucleotide
tacatttaattcctat

SEQ ID NO: 283 - DNA, 16 bp, Artificial Sequence
  Synthetic oligonucleotide
tactatgaaagagcag

SEQ ID NO: 284 - DNA, 16 bp, Artificial Sequence
  Synthetic oligonucleotide
ttaaagttatactatg

SEQ ID NO: 285 - DNA, 16 bp, Artificial Sequence
  Synthetic oligonucleotide
gttgaagaaaagattt

SEQ ID NO: 286 - DNA, 16 bp, Artificial Sequence
  Synthetic oligonucleotide
aagactcaagttgaag

SEQ ID NO: 287 - DNA, 16 bp, Artificial Sequence
  Synthetic oligonucleotide
ctatcttcaaagactc

SEQ ID NO: 288 - DNA, 16 bp, Artificial Sequence
  Synthetic oligonucleotide
cagaattaaaactatc

SEQ ID NO: 289 - DNA, 16 bp, Artificial Sequence
  Synthetic oligonucleotide
ttaatgtcacaagcag

SEQ ID NO: 290 - DNA, 16 bp, Artificial Sequence
  Synthetic oligonucleotide
gcccaaataatctttt

SEQ ID NO: 291 - DNA, 16 bp, Artificial Sequence
  Synthetic oligonucleotide
tcaacacctaataagc

SEQ ID NO: 292 - DNA, 16 bp, Artificial Sequence
  Synthetic oligonucleotide
aaccttggtctcttca

SEQ ID NO: 293 - DNA, 16 bp, Artificial Sequence
  Synthetic oligonucleotide
ttcacacagggcctgg

SEQ ID NO: 294 - DNA, 16 bp, Artificial Sequence
  Synthetic oligonucleotide
gctcaaaggttcacac

SEQ ID NO: 295 - DNA, 16 bp, Artificial Sequence
  Synthetic oligonucleotide
tctatgaaagctcaaa

SEQ ID NO: 296 - DNA, 16 bp, Artificial Sequence
  Synthetic oligonucleotide
gtgaaactctctatga

SEQ ID NO: 297 - DNA, 16 bp, Artificial Sequence
  Synthetic oligonucleotide
gtccatgctgtgaaac

SEQ ID NO: 298 - DNA, 16 bp, Artificial Sequence
  Synthetic oligonucleotide
catgacaacactggat

SEQ ID NO: 299 - DNA, 16 bp, Artificial Sequence
  Synthetic oligonucleotide
taaccaatgcatgaca

SEQ ID NO: 300 - DNA, 16 bp, Artificial Sequence
  Synthetic oligonucleotide
ccccattttgactaac

SEQ ID NO: 301 - DNA, 16 bp, Artificial Sequence
  Synthetic oligonucleotide
aactgccctagtccct

SEQ ID NO: 302 - DNA, 16 bp, Artificial Sequence
  Synthetic oligonucleotide
agctatccaaactgcc

SEQ ID NO: 303 - DNA, 16 bp, Artificial Sequence
  Synthetic oligonucleotide
atcttgttgagctatc

SEQ ID NO: 304 - DNA, 16 bp, Artificial Sequence
  Synthetic oligonucleotide
cttgatttgtcagcag

SEQ ID NO: 305 - DNA, 16 bp, Artificial Sequence
  Synthetic oligonucleotide
caacttttgagttaat

SEQ ID NO: 306 - DNA, 16 bp, Artificial Sequence
  Synthetic oligonucleotide
ccccaaaatctcaact

SEQ ID NO: 307 - DNA, 16 bp, Artificial Sequence
  Synthetic oligonucleotide
acaccaccaccccaaa

SEQ ID NO: 308 - DNA, 16 bp, Artificial Sequence
  Synthetic oligonucleotide
aatttaaccagtgtta

SEQ ID NO: 309 - DNA, 16 bp, Artificial Sequence
  Synthetic oligonucleotide
aatgttaatttaacca

SEQ ID NO: 310 - DNA, 16 bp, Artificial Sequence
  Synthetic oligonucleotide
atcagacttgaaaagt

SEQ ID NO: 311 - DNA, 16 bp, Artificial Sequence
  Synthetic oligonucleotide
atatggatcagacttg

SEQ ID NO: 312 - DNA, 16 bp, Artificial Sequence
  Synthetic oligonucleotide
aagatggtgtaacata

SEQ ID NO: 313 - DNA, 16 bp, Artificial Sequence
  Synthetic oligonucleotide
ctgcatcaagtcatgg

SEQ ID NO: 314 - DNA, 16 bp, Artificial Sequence
  Synthetic oligonucleotide
aactgcatcaagtcat

SEQ ID NO: 315 - DNA, 16 bp, Artificial Sequence
  Synthetic oligonucleotide
aaaactgcatcaagtc

SEQ ID NO: 316 - DNA, 16 bp, Artificial Sequence
  Synthetic oligonucleotide
aatcttatggttaggg

SEQ ID NO: 317 - DNA, 16 bp, Artificial Sequence
  Synthetic oligonucleotide
actcagtgggaaaact

SEQ ID NO: 318 - DNA, 16 bp, Artificial Sequence
  Synthetic oligonucleotide
tgactcagtgggaaaa

SEQ ID NO: 319 - DNA, 16 bp, Artificial Sequence
  Synthetic oligonucleotide
ctgatgtgactcagtg

SEQ ID NO: 320 - DNA, 16 bp, Artificial Sequence
  Synthetic oligonucleotide
ttctgatgtgactcag

SEQ ID NO: 321 - DNA, 16 bp, Artificial Sequence
  Synthetic oligonucleotide
tatctgtcagattctc

SEQ ID NO: 322 - DNA, 16 bp, Artificial Sequence
  Synthetic oligonucleotide
ggtatctgtcagattc

SEQ ID NO: 323 - DNA, 16 bp, Artificial Sequence
  Synthetic oligonucleotide
atggtatctgtcagat

SEQ ID NO: 324 - DNA, 16 bp, Artificial Sequence
  Synthetic oligonucleotide
ctttatggtatctgtc

SEQ ID NO: 325 - DNA, 16 bp, Artificial Sequence
  Synthetic oligonucleotide
ccctttatggtatctg

SEQ ID NO: 326 - DNA, 16 bp, Artificial Sequence
  Synthetic oligonucleotide
gctaatggattgggca

SEQ ID NO: 327 - DNA, 16 bp, Artificial Sequence
  Synthetic oligonucleotide
tcgctaatggattggg

SEQ ID NO: 328 - DNA, 16 bp, Artificial Sequence
  Synthetic oligonucleotide
actgtcgctaatggat

SEQ ID NO: 329 - DNA, 16 bp, Artificial Sequence
  Synthetic oligonucleotide
tcacttcattgtttaa

SEQ ID NO: 330 - DNA, 16 bp, Artificial Sequence
  Synthetic oligonucleotide
aaaactttttcacttc

SEQ ID NO: 331 - DNA, 16 bp, Artificial Sequence
  Synthetic oligonucleotide
agagattgtaaaactt

SEQ ID NO: 332 - DNA, 16 bp, Artificial Sequence
  Synthetic oligonucleotide
gccaaacctagagatt

SEQ ID NO: 333 - DNA, 16 bp, Artificial Sequence
  Synthetic oligonucleotide
agagaactagccaaac

SEQ ID NO: 334 - DNA, 16 bp, Artificial Sequence
  Synthetic oligonucleotide
accagtgttaagagaa

SEQ ID NO: 335 - DNA, 16 bp, Artificial Sequence
  Synthetic oligonucleotide
aaagtgtttatgcaat

SEQ ID NO: 336 - DNA, 16 bp, Artificial Sequence
  Synthetic oligonucleotide
agcattattaaatatg

SEQ ID NO: 337 - DNA, 16 bp, Artificial Sequence
  Synthetic oligonucleotide
tcaaaaggattgtttt

SEQ ID NO: 338 - DNA, 16 bp, Artificial Sequence
  Synthetic oligonucleotide
caccatgccatctcac

SEQ ID NO: 339 - DNA, 16 bp, Artificial Sequence
  Synthetic oligonucleotide
ctttcacctcaccatg

SEQ ID NO: 340 - DNA, 16 bp, Artificial Sequence
  Synthetic oligonucleotide
gtccagtgatactttc

SEQ ID NO: 341 - DNA, 16 bp, Artificial Sequence
  Synthetic oligonucleotide
cttcttcctagtccag

SEQ ID NO: 342 - DNA, 16 bp, Artificial Sequence
  Synthetic oligonucleotide
cctaagtcaccttctt

SEQ ID NO: 343 - DNA, 16 bp, Artificial Sequence
  Synthetic oligonucleotide
tatctagaacctaagt

SEQ ID NO: 344 - DNA, 16 bp, Artificial Sequence
  Synthetic oligonucleotide
aaagacacctatctag

SEQ ID NO: 345 - DNA, 16 bp, Artificial Sequence
  Synthetic oligonucleotide
tcagagtcctaaaaga

SEQ ID NO: 346 - DNA, 16 bp, Artificial Sequence
  Synthetic oligonucleotide
tcctcaaaatcagagt

SEQ ID NO: 347 - DNA, 16 bp, Artificial Sequence
  Synthetic oligonucleotide
atggatagtaagtgat

SEQ ID NO: 348 - DNA, 16 bp, Artificial Sequence
  Synthetic oligonucleotide
acatgaagaaatggat

SEQ ID NO: 349 - DNA, 16 bp, Artificial Sequence
  Synthetic oligonucleotide
cttcttttaacatgaa

SEQ ID NO: 350 - DNA, 16 bp, Artificial Sequence
  Synthetic oligonucleotide
tttgagatgacttctt

SEQ ID NO: 351 - DNA, 16 bp, Artificial Sequence
  Synthetic oligonucleotide
aactaagagtttgaga

SEQ ID NO: 352 - DNA, 16 bp, Artificial Sequence
  Synthetic oligonucleotide
aattacatagttgtaa

SEQ ID NO: 353 - DNA, 16 bp, Artificial Sequence
  Synthetic oligonucleotide
ccttatgtaaatggaa

SEQ ID NO: 354 - DNA, 16 bp, Artificial Sequence
  Synthetic oligonucleotide
taagtgtatccttatg

SEQ ID NO: 355 - DNA, 16 bp, Artificial Sequence
  Synthetic oligonucleotide
cttgacaaataagtgt

SEQ ID NO: 356 - DNA, 16 bp, Artificial Sequence
  Synthetic oligonucleotide
attgtgctgagcttga

SEQ ID NO: 357 - DNA, 16 bp, Artificial Sequence
  Synthetic oligonucleotide
ggttaaaaatttacag

SEQ ID NO: 358 - DNA, 16 bp, Artificial Sequence
  Synthetic oligonucleotide
agactggcactgaaga

SEQ ID NO: 359 - DNA, 16 bp, Artificial Sequence
  Synthetic oligonucleotide
aaacttcacctcttgc

SEQ ID NO: 360 - DNA, 16 bp, Artificial Sequence
  Synthetic oligonucleotide
tggatattcaaatata

SEQ ID NO: 361 - DNA, 16 bp, Artificial Sequence
  Synthetic oligonucleotide
aaacgagaatggatat

SEQ ID NO: 362 - DNA, 16 bp, Artificial Sequence
  Synthetic oligonucleotide
tggaagaagagtccta

SEQ ID NO: 363 - DNA, 16 bp, Artificial Sequence
  Synthetic oligonucleotide
agatgacactaatatg

SEQ ID NO: 364 - DNA, 16 bp, Artificial Sequence
  Synthetic oligonucleotide
gaaggtagggaggcaa

SEQ ID NO: 365 - DNA, 16 bp, Artificial Sequence
  Synthetic oligonucleotide
acaagtattaaaactg

SEQ ID NO: 366 - DNA, 16 bp, Artificial Sequence
  Synthetic oligonucleotide
gcagcagtaaatctta

SEQ ID NO: 367 - DNA, 16 bp, Artificial Sequence
  Synthetic oligonucleotide
atatccacagcagcag

SEQ ID NO: 368 - DNA, 16 bp, Artificial Sequence
  Synthetic oligonucleotide
cttcatggagatatcc

SEQ ID NO: 369 - DNA, 16 bp, Artificial Sequence
  Synthetic oligonucleotide
agatgtagggcatttc

SEQ ID NO: 370 - DNA, 16 bp, Artificial Sequence
  Synthetic oligonucleotide
gaggaaataagatgta

SEQ ID NO: 371 - DNA, 16 bp, Artificial Sequence
  Synthetic oligonucleotide
attctcttgagccctg

SEQ ID NO: 372 - DNA, 16 bp, Artificial Sequence
  Synthetic oligonucleotide
attaggtcaaatccct

SEQ ID NO: 373 - DNA, 16 bp, Artificial Sequence
  Synthetic oligonucleotide
aaattagtgattaggt

SEQ ID NO: 374 - DNA, 16 bp, Artificial Sequence
  Synthetic oligonucleotide
accacctgaaaattag

SEQ ID NO: 375 - DNA, 16 bp, Artificial Sequence
  Synthetic oligonucleotide
aaagcatcagccacca

SEQ ID NO: 376 - DNA, 16 bp, Artificial Sequence
  Synthetic oligonucleotide
gcaaagagatgttcaa

SEQ ID NO: 377 - DNA, 16 bp, Artificial Sequence
  Synthetic oligonucleotide
tgaaaaatcctactgt

SEQ ID NO: 378 - DNA, 16 bp, Artificial Sequence
  Synthetic oligonucleotide
taccaggtttgaaaaa

SEQ ID NO: 379 - DNA, 16 bp, Artificial Sequence
  Synthetic oligonucleotide
ctggatagggttctgt

SEQ ID NO: 380 - DNA, 16 bp, Artificial Sequence
  Synthetic oligonucleotide
ctccttccactggata

SEQ ID NO: 381 - DNA, 16 bp, Artificial Sequence
  Synthetic oligonucleotide
ctttattaaattctcc

SEQ ID NO: 382 - DNA, 16 bp, Artificial Sequence
  Synthetic oligonucleotide
cagcactatctttatt

SEQ ID NO: 383 - DNA, 16 bp, Artificial Sequence
  Synthetic oligonucleotide
aaggaattctttcagc

SEQ ID NO: 384 - DNA, 16 bp, Artificial Sequence
  Synthetic oligonucleotide
agattacctaaggaat

SEQ ID NO: 385 - DNA, 16 bp, Artificial Sequence
  Synthetic oligonucleotide
atctaatgtgaaaagg

SEQ ID NO: 386 - DNA, 16 bp, Artificial Sequence
  Synthetic oligonucleotide
taatttatctaatgtg

SEQ ID NO: 387 - DNA, 16 bp, Artificial Sequence
  Synthetic oligonucleotide
ttaggagtctttatag

SEQ ID NO: 388 - DNA, 16 bp, Artificial Sequence
  Synthetic oligonucleotide
aagctattaggagtct

SEQ ID NO: 389 - DNA, 16 bp, Artificial Sequence
  Synthetic oligonucleotide
tgctataataatcccc

SEQ ID NO: 390 - DNA, 16 bp, Artificial Sequence
  Synthetic oligonucleotide
taattcctatgagaat

SEQ ID NO: 391 - DNA, 16 bp, Artificial Sequence
  Synthetic oligonucleotide
agagcagtctgacaca

SEQ ID NO: 392 - DNA, 16 bp, Artificial Sequence
  Synthetic oligonucleotide
tagcatgtaaatatag

SEQ ID NO: 393 - DNA, 16 bp, Artificial Sequence
  Synthetic oligonucleotide
atgacaaactatagga

SEQ ID NO: 394 - DNA, 16 bp, Artificial Sequence
  Synthetic oligonucleotide
ggatgacaaactatag

SEQ ID NO: 395 - DNA, 16 bp, Artificial Sequence
  Synthetic oligonucleotide
atcagggatgacaaac

SEQ ID NO: 396 - DNA, 16 bp, Artificial Sequence
  Synthetic oligonucleotide
tcatcagggatgacaa

SEQ ID NO: 397 - DNA, 16 bp, Artificial Sequence
  Synthetic oligonucleotide
attcatcagggatgac

SEQ ID NO: 398 - DNA, 16 bp, Artificial Sequence
  Synthetic oligonucleotide
acattcatcagggatg

SEQ ID NO: 399 - DNA, 16 bp, Artificial Sequence
  Synthetic oligonucleotide
taactttacattcatc

SEQ ID NO: 400 - DNA, 16 bp, Artificial Sequence
  Synthetic oligonucleotide
acagtgtaactttaca

SEQ ID NO: 401 - DNA, 16 bp, Artificial Sequence
  Synthetic oligonucleotide
gaacagtgtaacttta

SEQ ID NO: 402 - DNA, 16 bp, Artificial Sequence
  Synthetic oligonucleotide
gtgaacagtgtaactt

SEQ ID NO: 403 - DNA, 16 bp, Artificial Sequence
  Synthetic oligonucleotide
ttgtgaacagtgtaac

SEQ ID NO: 404 - DNA, 16 bp, Artificial Sequence
  Synthetic oligonucleotide
acctttgtgaacagtg

SEQ ID NO: 405 - DNA, 16 bp, Artificial Sequence
  Synthetic oligonucleotide
aaacctttgtgaacag

SEQ ID NO: 406 - DNA, 16 bp, Artificial Sequence
  Synthetic oligonucleotide
caaaacctttgtgaac

SEQ ID NO: 407 - DNA, 16 bp, Artificial Sequence
  Synthetic oligonucleotide
gagacaaaacctttgt

SEQ ID NO: 408 - DNA, 16 bp, Artificial Sequence
  Synthetic oligonucleotide
gactaatagcagtgga

SEQ ID NO: 409 - DNA, 16 bp, Artificial Sequence
  Synthetic oligonucleotide
atgactaatagcagtg

SEQ ID NO: 410 - DNA, 16 bp, Artificial Sequence
  Synthetic oligonucleotide
agagtgaccatgacta

SEQ ID NO: 411 - DNA, 16 bp, Artificial Sequence
  Synthetic oligonucleotide
ccattgccttgtaatt

SEQ ID NO: 412 - DNA, 16 bp, Artificial Sequence
  Synthetic oligonucleotide
tagtttccattgcctt

SEQ ID NO: 413 - DNA, 16 bp, Artificial Sequence
  Synthetic oligonucleotide
aatagtttccattgcc

SEQ ID NO: 414 - DNA, 16 bp, Artificial Sequence
  Synthetic oligonucleotide
ataatagtttccattg

SEQ ID NO: 415 - DNA, 16 bp, Artificial Sequence
  Synthetic oligonucleotide
gccttataatagtttc

SEQ ID NO: 416 - DNA, 16 bp, Artificial Sequence
  Synthetic oligonucleotide
atggccttataatagt

SEQ ID NO: 417 - DNA, 16 bp, Artificial Sequence
  Synthetic oligonucleotide
aaatggccttataata

SEQ ID NO: 418 - DNA, 16 bp, Artificial Sequence
  Synthetic oligonucleotide
gagtctttatagtaat

SEQ ID NO: 419 - DNA, 16 bp, Artificial Sequence
  Synthetic oligonucleotide
ggagtctttatagtaa

SEQ ID NO: 420 - DNA, 16 bp, Artificial Sequence
  Synthetic oligonucleotide
aggagtctttatagta

SEQ ID NO: 421 - DNA, 16 bp, Artificial Sequence
  Synthetic oligonucleotide
taggagtctttatagt

SEQ ID NO: 422 - DNA, 16 bp, Artificial Sequence
  Synthetic oligonucleotide
attaggagtctttata

SEQ ID NO: 423 - DNA, 16 bp, Artificial Sequence
  Synthetic oligonucleotide
tattaggagtctttat

SEQ ID NO: 424 - DNA, 16 bp, Artificial Sequence
  Synthetic oligonucleotide
ctattaggagtcttta

SEQ ID NO: 425 - DNA, 16 bp, Artificial Sequence
  Synthetic oligonucleotide
agctattaggagtctt

SEQ ID NO: 426 - DNA, 16 bp, Artificial Sequence
  Synthetic oligonucleotide
aaagctattaggagtc

SEQ ID NO: 427 - DNA, 16 bp, Artificial Sequence
  Synthetic oligonucleotide
aaaagctattaggagt

SEQ ID NO: 428 - DNA, 16 bp, Artificial Sequence
  Synthetic oligonucleotide
gaaaagctattaggag

SEQ ID NO: 429 - DNA, 16 bp, Artificial Sequence
  Synthetic oligonucleotide
ggaaaagctattagga

SEQ ID NO: 430 - DNA, 16 bp, Artificial Sequence
  Synthetic oligonucleotide
aggaaaagctattagg

SEQ ID NO: 431 - DNA, 16 bp, Artificial Sequence
  Synthetic oligonucleotide
caggaaaagctattag

SEQ ID NO: 432 - DNA, 16 bp, Artificial Sequence
  Synthetic oligonucleotide
ctgccttaacaggaaa

SEQ ID NO: 433 - DNA, 16 bp, Artificial Sequence
  Synthetic oligonucleotide
atttcatactgggtct

SEQ ID NO: 434 - DNA, 16 bp, Artificial Sequence
  Synthetic oligonucleotide
tccccatttcatactg

SEQ ID NO: 435 - DNA, 16 bp, Artificial Sequence
  Synthetic oligonucleotide
ctataataatccccat

SEQ ID NO: 436 - DNA, 16 bp, Artificial Sequence
  Synthetic oligonucleotide
ttgctataataatccc

SEQ ID NO: 437 - DNA, 16 bp, Artificial Sequence
  Synthetic oligonucleotide
gttgctataataatcc

SEQ ID NO: 438 - DNA, 16 bp, Artificial Sequence
  Synthetic oligonucleotide
ggttgctataataatc

SEQ ID NO: 439 - DNA, 16 bp, Artificial Sequence
  Synthetic oligonucleotide
tggttgctataataat

SEQ ID NO: 440 - DNA, 16 bp, Artificial Sequence
  Synthetic oligonucleotide
atggttgctataataa

SEQ ID NO: 441 - DNA, 16 bp, Artificial Sequence
  Synthetic oligonucleotide
aatggttgctataata

SEQ ID NO: 442 - DNA, 16 bp, Artificial Sequence
  Synthetic oligonucleotide
aaatggttgctataat

SEQ ID NO: 443 - DNA, 16 bp, Artificial Sequence
  Synthetic oligonucleotide
ccaaaatggttgctat

SEQ ID NO: 444 - DNA, 16 bp, Artificial Sequence
  Synthetic oligonucleotide
gtaaatatagccccaa

SEQ ID NO: 445 - DNA, 16 bp, Artificial Sequence
  Synthetic oligonucleotide
atgtaaatatagcccc

SEQ ID NO: 446 - DNA, 16 bp, Artificial Sequence
  Synthetic oligonucleotide
agtagcatgtaaatat

SEQ ID NO: 447 - DNA, 16 bp, Artificial Sequence
  Synthetic oligonucleotide
atttagtagcatgtaa

SEQ ID NO: 448 - DNA, 16 bp, Artificial Sequence
  Synthetic oligonucleotide
tttaattcctatgaga

SEQ ID NO: 449 - DNA, 16 bp, Artificial Sequence
  Synthetic oligonucleotide
gactacatttaattcc

SEQ ID NO: 450 - DNA, 16 bp, Artificial Sequence
  Synthetic oligonucleotide
ggagactacatttaat

SEQ ID NO: 451 - DNA, 16 bp, Artificial Sequence
  Synthetic oligonucleotide
cagggagactacattt

SEQ ID NO: 452 - DNA, 16 bp, Artificial Sequence
  Synthetic oligonucleotide
gagcagtctgacacag

SEQ ID NO: 453 - DNA, 16 bp, Artificial Sequence
  Synthetic oligonucleotide
aaagagcagtctgaca

SEQ ID NO: 454 - DNA, 16 bp, Artificial Sequence
  Synthetic oligonucleotide
gaaagagcagtctgac

SEQ ID NO: 455 - DNA, 16 bp, Artificial Sequence
  Synthetic oligonucleotide
tgaaagagcagtctga

SEQ ID NO: 456 - DNA, 16 bp, Artificial Sequence
  Synthetic oligonucleotide
atgaaagagcagtctg

SEQ ID NO: 457 - DNA, 16 bp, Artificial Sequence
  Synthetic oligonucleotide
tatgaaagagcagtct

SEQ ID NO: 458 - DNA, 16 bp, Artificial Sequence
  Synthetic oligonucleotide
ctatgaaagagcagtc

SEQ ID NO: 459 - DNA, 16 bp, Artificial Sequence
  Synthetic oligonucleotide
accaaaactctgggaa

SEQ ID NO: 460 - DNA, 16 bp, Artificial Sequence
  Synthetic oligonucleotide
ctagttcaaaaaccaa

SEQ ID NO: 461 - DNA, 16 bp, Artificial Sequence
  Synthetic oligonucleotide
gcattgctagttcaaa

SEQ ID NO: 462 - DNA, 16 bp, Artificial Sequence
  Synthetic oligonucleotide
ccaaaaaccccaagac

SEQ ID NO: 463 - DNA, 16 bp, Artificial Sequence
  Synthetic oligonucleotide
caactgcatgcaccaa

SEQ ID NO: 464 - DNA, 16 bp, Artificial Sequence
  Synthetic oligonucleotide
agtaatcaactgcatg

SEQ ID NO: 465 - DNA, 16 bp, Artificial Sequence
  Synthetic oligonucleotide
tatgtgactagataaa

SEQ ID NO: 466 - DNA, 16 bp, Artificial Sequence
  Synthetic oligonucleotide
attagtaattaatcca

SEQ ID NO: 467 - DNA, 16 bp, Artificial Sequence
  Synthetic oligonucleotide
aactgcatgcaccaaa

SEQ ID NO: 468 - DNA, 16 bp, Artificial Sequence
  Synthetic oligonucleotide
aactctgggaatactg

SEQ ID NO: 469 - DNA, 16 bp, Artificial Sequence
  Synthetic oligonucleotide
aaactctgggaatact

SEQ ID NO: 470 - DNA, 16 bp, Artificial Sequence
  Synthetic oligonucleotide
aaccaaaactctggga

SEQ ID NO: 471 - DNA, 16 bp, Artificial Sequence
  Synthetic oligonucleotide
gctagttcaaaaacca

SEQ ID NO: 472 - DNA, 16 bp, Artificial Sequence
  Synthetic oligonucleotide
ttgctagttcaaaaac

SEQ ID NO: 473 - DNA, 16 bp, Artificial Sequence
  Synthetic oligonucleotide
attgctagttcaaaaa

SEQ ID NO: 474 - DNA, 16 bp, Artificial Sequence
  Synthetic oligonucleotide
cattgctagttcaaaa

SEQ ID NO: 475 - DNA, 16 bp, Artificial Sequence
  Synthetic oligonucleotide
ggcattgctagttcaa

SEQ ID NO: 476 - DNA, 16 bp, Artificial Sequence
  Synthetic oligonucleotide
cacaggcattgctagt

SEQ ID NO: 477 - DNA, 16 bp, Artificial Sequence
  Synthetic oligonucleotide
tcacaggcattgctag

SEQ ID NO: 478 - DNA, 16 bp, Artificial Sequence
  Synthetic oligonucleotide
ttcacaggcattgcta

SEQ ID NO: 479 - DNA, 16 bp, Artificial Sequence
  Synthetic oligonucleotide
atcttaggtattcagt

SEQ ID NO: 480 - DNA, 16 bp, Artificial Sequence
  Synthetic oligonucleotide
cagaaatcttaggtat

SEQ ID NO: 481 - DNA, 16 bp, Artificial Sequence
  Synthetic oligonucleotide
ccccaagacagaaatc

SEQ ID NO: 482 - DNA, 16 bp, Artificial Sequence
  Synthetic oligonucleotide
gcaccaaaaaccccaa

SEQ ID NO: 483 - DNA, 16 bp, Artificial Sequence
  Synthetic oligonucleotide
catgcaccaaaaaccc

SEQ ID NO: 484 - DNA, 16 bp, Artificial Sequence
  Synthetic oligonucleotide
ctgcatgcaccaaaaa

SEQ ID NO: 485 - DNA, 16 bp, Artificial Sequence
  Synthetic oligonucleotide
actgcatgcaccaaaa

SEQ ID NO: 486 - DNA, 16 bp, Artificial Sequence
  Synthetic oligonucleotide
tcaactgcatgcacca

SEQ ID NO: 487 - DNA, 16 bp, Artificial Sequence
  Synthetic oligonucleotide
aatcaactgcatgcac

SEQ ID NO: 488 - DNA, 16 bp, Artificial Sequence
  Synthetic oligonucleotide
taatcaactgcatgca

SEQ ID NO: 489 - DNA, 16 bp, Artificial Sequence
  Synthetic oligonucleotide
aagtaatcaactgcat

SEQ ID NO: 490 - DNA, 16 bp, Artificial Sequence
  Synthetic oligonucleotide
gaagtaatcaactgca

SEQ ID NO: 491 - DNA, 16 bp, Artificial Sequence
  Synthetic oligonucleotide
agaagtaatcaactgc

SEQ ID NO: 492 - DNA, 16 bp, Artificial Sequence
  Synthetic oligonucleotide
tcacaattggtaagaa

SEQ ID NO: 493 - DNA, 16 bp, Artificial Sequence
  Synthetic oligonucleotide
attcacaattggtaag

SEQ ID NO: 494 - DNA, 16 bp, Artificial Sequence
  Synthetic oligonucleotide
acattcacaattggta

SEQ ID NO: 495 - DNA, 16 bp, Artificial Sequence
  Synthetic oligonucleotide
caccaacattcacaat

SEQ ID NO: 496 - DNA, 16 bp, Artificial Sequence
  Synthetic oligonucleotide
tcacaccaacattcac

SEQ ID NO: 497 - DNA, 16 bp, Artificial Sequence
  Synthetic oligonucleotide
tttcacaccaacattc

SEQ ID NO: 498 - DNA, 16 bp, Artificial Sequence
  Synthetic oligonucleotide
tttgtttcacaccaac

SEQ ID NO: 499 - DNA, 16 bp, Artificial Sequence
  Synthetic oligonucleotide
aatttgtttcacacca

SEQ ID NO: 500 - DNA, 16 bp, Artificial Sequence
  Synthetic oligonucleotide
atagggatgattcaaa

SEQ ID NO: 501 - DNA, 16 bp, Artificial Sequence
  Synthetic oligonucleotide
gaatagggatgattca

SEQ ID NO: 502 - DNA, 16 bp, Artificial Sequence
  Synthetic oligonucleotide
cagaatagggatgatt

SEQ ID NO: 503 - DNA, 16 bp, Artificial Sequence
  Synthetic oligonucleotide
cacagaatagggatga

SEQ ID NO: 504 - DNA, 16 bp, Artificial Sequence
  Synthetic oligonucleotide
gtgactagataaaaca

SEQ ID NO: 505 - DNA, 16 bp, Artificial Sequence
  Synthetic oligonucleotide
tttatgtgactagata

SEQ ID NO: 506 - DNA, 16 bp, Artificial Sequence
  Synthetic oligonucleotide
tccatttatgtgacta

SEQ ID NO: 507 - DNA, 16 bp, Artificial Sequence
  Synthetic oligonucleotide
tcaactgaaattagta

SEQ ID NO: 508 - DNA, 16 bp, Artificial Sequence
  Synthetic oligonucleotide
tagaaggtctcaactg

SEQ ID NO: 509 - DNA, 16 bp, Artificial Sequence
  Synthetic oligonucleotide
attagaaggtctcaac

SEQ ID NO: 510 - DNA, 16 bp, Artificial Sequence
  Synthetic oligonucleotide
caattagaaggtctca

SEQ ID NO: 511 - DNA, 16 bp, Artificial Sequence
  Synthetic oligonucleotide
aaaccaattagaaggt

SEQ ID NO: 512 - DNA, 16 bp, Artificial Sequence
  Synthetic oligonucleotide
gtaaaaaccaattaga

SEQ ID NO: 513 - DNA, 16 bp, Artificial Sequence
  Synthetic oligonucleotide
ccctcaatgtttcagt

SEQ ID NO: 514 - DNA, 16 bp, Artificial Sequence
  Synthetic oligonucleotide
ttccctcaatgtttca

SEQ ID NO: 515 - DNA, 16 bp, Artificial Sequence
  Synthetic oligonucleotide
aaatttgtgttccctc

SEQ ID NO: 516 - DNA, 16 bp, Artificial Sequence
  Synthetic oligonucleotide
ataaatttgtgttccc

SEQ ID NO: 517 - DNA, 16 bp, Artificial Sequence
  Synthetic oligonucleotide
ccataaatttgtgttc

SEQ ID NO: 518 - DNA, 16 bp, Artificial Sequence
  Synthetic oligonucleotide
aagcccataaatttgt

SEQ ID NO: 519 - DNA, 16 bp, Artificial Sequence
  Synthetic oligonucleotide
aggaagcccataaatt

SEQ ID NO: 520 - DNA, 16 bp, Artificial Sequence
  Synthetic oligonucleotide
caggaagcccataaat

SEQ ID NO: 521 - DNA, 16 bp, Artificial Sequence
  Synthetic oligonucleotide
tcaggaagcccataaa

SEQ ID NO: 522 - DNA, 16 bp, Artificial Sequence
  Synthetic oligonucleotide
atcaggaagcccataa

SEQ ID NO: 523 - DNA, 16 bp, Artificial Sequence
  Synthetic oligonucleotide
catcaggaagcccata

SEQ ID NO: 524 - DNA, 16 bp, Artificial Sequence
  Synthetic oligonucleotide
atcatcaggaagccca

SEQ ID NO: 525 - DNA, 16 bp, Artificial Sequence
  Synthetic oligonucleotide
catcatcaggaagccc

SEQ ID NO: 526 - DNA, 16 bp, Artificial Sequence
  Synthetic oligonucleotide
tcatcatcaggaagcc

SEQ ID NO: 527 - DNA, 16 bp, Artificial Sequence
  Synthetic oligonucleotide
atcatcatcaggaagc

SEQ ID NO: 528 - DNA, 16 bp, Artificial Sequence
  Synthetic oligonucleotide
gaatcatcatcaggaa

SEQ ID NO: 529 - DNA, 16 bp, Artificial Sequence
  Synthetic oligonucleotide
agaatcatcatcagga

SEQ ID NO: 530 - DNA, 16 bp, Artificial Sequence
  Synthetic oligonucleotide
tagaagaatcatcatc

SEQ ID NO: 531 - DNA, 16 bp, Artificial Sequence
  Synthetic oligonucleotide
cctagaagaatcatca

SEQ ID NO: 532 - DNA, 16 bp, Artificial Sequence
  Synthetic oligonucleotide
gacatgatgcctagaa

SEQ ID NO: 533 - DNA, 16 bp, Artificial Sequence
  Synthetic oligonucleotide
aggacatgatgcctag

SEQ ID NO: 534 - DNA, 16 bp, Artificial Sequence
  Synthetic oligonucleotide
actataggacatgatg

SEQ ID NO: 535 - DNA, 16 bp, Artificial Sequence
  Synthetic oligonucleotide
gacaaactataggaca

SEQ ID NO: 536 - DNA, 16 bp, Artificial Sequence
  Synthetic oligonucleotide
taccacaagtttatat

SEQ ID NO: 537 - DNA, 16 bp, Artificial Sequence
  Synthetic oligonucleotide
atgattctgaattagc

SEQ ID NO: 538 - DNA, 16 bp, Artificial Sequence
  Synthetic oligonucleotide
cttcaaatgatttagt

SEQ ID NO: 539 - DNA, 16 bp, Artificial Sequence
  Synthetic oligonucleotide
ggtgaatatcttcaaa

SEQ ID NO: 540 - DNA, 16 bp, Artificial Sequence
  Synthetic oligonucleotide
tcctgagcctgttttg

SEQ ID NO: 541 - DNA, 16 bp, Artificial Sequence
  Synthetic oligonucleotide
tgtatagaaggcatca

SEQ ID NO: 542 - DNA, 16 bp, Artificial Sequence
  Synthetic oligonucleotide
aattacacactttgtc

SEQ ID NO: 543 - DNA, 16 bp, Artificial Sequence
  Synthetic oligonucleotide
aacttccactgtcatt

SEQ ID NO: 544 - DNA, 16 bp, Artificial Sequence
  Synthetic oligonucleotide
cagtcattttcagcag

SEQ ID NO: 545 - DNA, 16 bp, Artificial Sequence
  Synthetic oligonucleotide
attctgaattagctgt

SEQ ID NO: 546 - DNA, 16 bp, Artificial Sequence
  Synthetic oligonucleotide
tagaaggcaaatcaca

SEQ ID NO: 547 - DNA, 16 bp, Artificial Sequence
  Synthetic oligonucleotide
ttctagaaggcaaatc

SEQ ID NO: 548 - DNA, 16 bp, Artificial Sequence
  Synthetic oligonucleotide
ctactgttctagaagg

SEQ ID NO: 549 - DNA, 16 bp, Artificial Sequence
  Synthetic oligonucleotide
tatgttttcgaatttc

SEQ ID NO: 550 - DNA, 16 bp, Artificial Sequence
  Synthetic oligonucleotide
ttgcctacgccaccag

SEQ ID NO: 551 - DNA, 16 bp, Artificial Sequence
  Synthetic oligonucleotide
caccttcgccgccgcc

SEQ ID NO: 552 - DNA, 16 bp, Artificial Sequence
  Synthetic oligonucleotide
gtactggccgagccgc

SEQ ID NO: 553 - DNA, 16 bp, Artificial Sequence
  Synthetic oligonucleotide
agtccgaaatggcggg

SEQ ID NO: 554 - DNA, 16 bp, Artificial Sequence
  Synthetic oligonucleotide
ccttcagtgcctgcgc

SEQ ID NO: 555 - DNA, 16 bp, Artificial Sequence
  Synthetic oligonucleotide
ccgccttcagtgcctg

SEQ ID NO: 556 - DNA, 16 bp, Artificial Sequence
  Synthetic oligonucleotide
cacctgggagccgctg

SEQ ID NO: 557 - DNA, 16 bp, Artificial Sequence
  Synthetic oligonucleotide
cctctctcccgcacct

SEQ ID NO: 558 - DNA, 16 bp, Artificial Sequence
  Synthetic oligonucleotide
cattttcagcaggcct

SEQ ID NO: 559 - DNA, 16 bp, Artificial Sequence
  Synthetic oligonucleotide
gtcattttcagcaggc

SEQ ID NO: 560 - DNA, 16 bp, Artificial Sequence
  Synthetic oligonucleotide
aggcactcttgcctac

SEQ ID NO: 561 - DNA, 16 bp, Artificial Sequence
  Synthetic oligonucleotide
attactacttgcttcc

SEQ ID NO: 562 - DNA, 16 bp, Artificial Sequence
  Synthetic oligonucleotide
caattactacttgctt

SEQ ID NO: 563 - DNA, 16 bp, Artificial Sequence
  Synthetic oligonucleotide
atcaattactacttgc

SEQ ID NO: 564 - DNA, 16 bp, Artificial Sequence
  Synthetic oligonucleotide
ccatcaattactactt

SEQ ID NO: 565 - DNA, 16 bp, Artificial Sequence
  Synthetic oligonucleotide
atccaagagacaggtt

SEQ ID NO: 566 - DNA, 16 bp, Artificial Sequence
  Synthetic oligonucleotide
gaatatccaagagaca

SEQ ID NO: 567 - DNA, 16 bp, Artificial Sequence
  Synthetic oligonucleotide
ctcttgacctgctgtg

SEQ ID NO: 568 - DNA, 16 bp, Artificial Sequence
  Synthetic oligonucleotide
actcctcttgacctgc

SEQ ID NO: 569 - DNA, 16 bp, Artificial Sequence
  Synthetic oligonucleotide
aatggtgaatatcttc

SEQ ID NO: 570 - DNA, 16 bp, Artificial Sequence
  Synthetic oligonucleotide
ctctataatggtgaat

SEQ ID NO: 571 - DNA, 16 bp, Artificial Sequence
  Synthetic oligonucleotide
gtccttaactctttta

SEQ ID NO: 572 - DNA, 16 bp, Artificial Sequence
  Synthetic oligonucleotide
ttcagagtccttaact

SEQ ID NO: 573 - DNA, 16 bp, Artificial Sequence
  Synthetic oligonucleotide
gaaggcaaatcacatt

SEQ ID NO: 574 - DNA, 16 bp, Artificial Sequence
  Synthetic oligonucleotide
gtctactgttctagaa

SEQ ID NO: 575 - DNA, 16 bp, Artificial Sequence
  Synthetic oligonucleotide
ttgctaagtcctgagc

SEQ ID NO: 576 - DNA, 16 bp, Artificial Sequence
  Synthetic oligonucleotide
ttcttgctaagtcctg

SEQ ID NO: 577 - DNA, 16 bp, Artificial Sequence
  Synthetic oligonucleotide
ataacttcttgctaag

SEQ ID NO: 578 - DNA, 16 bp, Artificial Sequence
  Synthetic oligonucleotide
ccataacttcttgcta

SEQ ID NO: 579 - DNA, 16 bp, Artificial Sequence
  Synthetic oligonucleotide
aggaattccataactt

SEQ ID NO: 580 - DNA, 16 bp, Artificial Sequence
  Synthetic oligonucleotide
aaaggaattccataac

SEQ ID NO: 581 - DNA, 16 bp, Artificial Sequence
  Synthetic oligonucleotide
tgctgatgtttcaata

SEQ ID NO: 582 - DNA, 16 bp, Artificial Sequence
  Synthetic oligonucleotide
taatgtatagaaggca

SEQ ID NO: 583 - DNA, 16 bp, Artificial Sequence
  Synthetic oligonucleotide
actaatgtatagaagg

SEQ ID NO: 584 - DNA, 16 bp, Artificial Sequence
  Synthetic oligonucleotide
tcgaactaatgtatag

SEQ ID NO: 585 - DNA, 16 bp, Artificial Sequence
  Synthetic oligonucleotide
tctcgaactaatgtat

SEQ ID NO: 586 - DNA, 16 bp, Artificial Sequence
  Synthetic oligonucleotide
atttctcgaactaatg

SEQ ID NO: 587 - DNA, 16 bp, Artificial Sequence
  Synthetic oligonucleotide
gaatttctcgaactaa

SEQ ID NO: 588 - DNA, 16 bp, Artificial Sequence
  Synthetic oligonucleotide
tttcgaatttctcgaa

SEQ ID NO: 589 - DNA, 16 bp, Artificial Sequence
  Synthetic oligonucleotide
ttctttatgttttcga

SEQ ID NO: 590 - DNA, 16 bp, Artificial Sequence
  Synthetic oligonucleotide
acacactttgtctttg

SEQ ID NO: 591 - DNA, 16 bp, Artificial Sequence
  Synthetic oligonucleotide
actagtatgccttaag

SEQ ID NO: 592 - DNA, 16 bp, Artificial Sequence
  Synthetic oligonucleotide
gtactagtatgcctta

SEQ ID NO: 593 - DNA, 16 bp, Artificial Sequence
  Synthetic oligonucleotide
ttgtactagtatgcct

SEQ ID NO: 594 - DNA, 16 bp, Artificial Sequence
  Synthetic oligonucleotide
aaaattaccacttgta

SEQ ID NO: 595 - DNA, 16 bp, Artificial Sequence
  Synthetic oligonucleotide
gtacaaaaattaccac

SEQ ID NO: 596 - DNA, 16 bp, Artificial Sequence
  Synthetic oligonucleotide
agtgtaatgtacaaaa

SEQ ID NO: 597 - DNA, 16 bp, Artificial Sequence
  Synthetic oligonucleotide
ataatttagtgtaatg

SEQ ID NO: 598 - DNA, 16 bp, Artificial Sequence
  Synthetic oligonucleotide
gctaataatttagtgt

SEQ ID NO: 599 - DNA, 16 bp, Artificial Sequence
  Synthetic oligonucleotide
atgctaataatttagt

SEQ ID NO: 600 - DNA, 16 bp, Artificial Sequence
  Synthetic oligonucleotide
aggtaatgctaaaaca

SEQ ID NO: 601 - DNA, 16 bp, Artificial Sequence
  Synthetic oligonucleotide
ttaggtaatgctaaaa

SEQ ID NO: 602 - DNA, 16 bp, Artificial Sequence
  Synthetic oligonucleotide
aattaggtaatgctaa

SEQ ID NO: 603 - DNA, 16 bp, Artificial Sequence
  Synthetic oligonucleotide
gtctgcatggagcagg

SEQ ID NO: 604 - DNA, 16 bp, Artificial Sequence
  Synthetic oligonucleotide
aacagtctgcatggag

SEQ ID NO: 605 - DNA, 16 bp, Artificial Sequence
  Synthetic oligonucleotide
agctaacagtctgcat

SEQ ID NO: 606 - DNA, 16 bp, Artificial Sequence
  Synthetic oligonucleotide
gtaaaagctaacagtc

SEQ ID NO: 607 - DNA, 16 bp, Artificial Sequence
  Synthetic oligonucleotide
aggtaaaagctaacag

SEQ ID NO: 608 - DNA, 16 bp, Artificial Sequence
  Synthetic oligonucleotide
taaggtaaaagctaac

SEQ ID NO: 609 - DNA, 16 bp, Artificial Sequence
  Synthetic oligonucleotide
gcatttaaggtaaaag

SEQ ID NO: 610 - DNA, 16 bp, Artificial Sequence
  Synthetic oligonucleotide
aaaaacttccactgtc

SEQ ID NO: 611 - DNA, 16 bp, Artificial Sequence
  Synthetic oligonucleotide
tggcacttagaggaaa

SEQ ID NO: 612 - DNA, 16 bp, Artificial Sequence
  Synthetic oligonucleotide
gaatactggcacttag

SEQ ID NO: 613 - DNA, 16 bp, Artificial Sequence
  Synthetic oligonucleotide
ttcaaagactcaagtt

SEQ ID NO: 614 - DNA, 16 bp, Artificial Sequence
  Synthetic oligonucleotide
actatcttcaaagact

SEQ ID NO: 615 - DNA, 16 bp, Artificial Sequence
  Synthetic oligonucleotide
tttaatgtcacaagca

SEQ ID NO: 616 - DNA, 16 bp, Artificial Sequence
  Synthetic oligonucleotide
ttgcaaccttggtctc

SEQ ID NO: 617 - DNA, 16 bp, Artificial Sequence
  Synthetic oligonucleotide
gaaagctcaaaggttc

SEQ ID NO: 618 - DNA, 16 bp, Artificial Sequence
  Synthetic oligonucleotide
gacaacactggatgac

SEQ ID NO: 619 - DNA, 16 bp, Artificial Sequence
  Synthetic oligonucleotide
atgcatgacaacactg

SEQ ID NO: 620 - DNA, 16 bp, Artificial Sequence
  Synthetic oligonucleotide
tgtcagcaggaccacc

SEQ ID NO: 621 - DNA, 16 bp, Artificial Sequence
  Synthetic oligonucleotide
gatttgtcagcaggac

SEQ ID NO: 622 - DNA, 16 bp, Artificial Sequence
  Synthetic oligonucleotide
ctcaacttttgagtta

SEQ ID NO: 623 - DNA, 16 bp, Artificial Sequence
  Synthetic oligonucleotide
actatgaaagagcagt

SEQ ID NO: 624 - DNA, 16 bp, Artificial Sequence
  Synthetic oligonucleotide
tatactatgaaagagc

SEQ ID NO: 625 - DNA, 16 bp, Artificial Sequence
  Synthetic oligonucleotide
gttatactatgaaaga

SEQ ID NO: 626 - DNA, 16 bp, Artificial Sequence
  Synthetic oligonucleotide
agatttaaagttatac

SEQ ID NO: 627 - DNA, 16 bp, Artificial Sequence
  Synthetic oligonucleotide
gactcaagttgaagaa

SEQ ID NO: 628 - DNA, 16 bp, Artificial Sequence
  Synthetic oligonucleotide
caaagactcaagttga

SEQ ID NO: 629 - DNA, 16 bp, Artificial Sequence
  Synthetic oligonucleotide
tcaaagactcaagttg

SEQ ID NO: 630 - DNA, 16 bp, Artificial Sequence
  Synthetic oligonucleotide
cttcaaagactcaagt

SEQ ID NO: 631 - DNA, 16 bp, Artificial Sequence
  Synthetic oligonucleotide
tcttcaaagactcaag

SEQ ID NO: 632 - DNA, 16 bp, Artificial Sequence
  Synthetic oligonucleotide
aactatcttcaaagac

SEQ ID NO: 633 - DNA, 16 bp, Artificial Sequence
  Synthetic oligonucleotide
tgtcacaagcagaatt

SEQ ID NO: 634 - DNA, 16 bp, Artificial Sequence
  Synthetic oligonucleotide
atgtcacaagcagaat

SEQ ID NO: 635 - DNA, 16 bp, Artificial Sequence
  Synthetic oligonucleotide
aatgtcacaagcagaa

SEQ ID NO: 636 - DNA, 16 bp, Artificial Sequence
  Synthetic oligonucleotide
taatgtcacaagcaga

SEQ ID NO: 637 - DNA, 16 bp, Artificial Sequence
  Synthetic oligonucleotide
ttttaatgtcacaagc

SEQ ID NO: 638 - DNA, 16 bp, Artificial Sequence
  Synthetic oligonucleotide
cttttaatgtcacaag

SEQ ID NO: 639 - DNA, 16 bp, Artificial Sequence
  Synthetic oligonucleotide
tcttttaatgtcacaa

SEQ ID NO: 640 - DNA, 16 bp, Artificial Sequence
  Synthetic oligonucleotide
atcttttaatgtcaca

SEQ ID NO: 641 - DNA, 16 bp, Artificial Sequence
  Synthetic oligonucleotide
aatcttttaatgtcac

SEQ ID NO: 642 - DNA, 16 bp, Artificial Sequence
  Synthetic oligonucleotide
taatcttttaatgtca

SEQ ID NO: 643 - DNA, 16 bp, Artificial Sequence
  Synthetic oligonucleotide
ataatcttttaatgtc

SEQ ID NO: 644 - DNA, 16 bp, Artificial Sequence
  Synthetic oligonucleotide
ctaataagctataact

SEQ ID NO: 645 - DNA, 16 bp, Artificial Sequence
  Synthetic oligonucleotide
acctaataagctataa

SEQ ID NO: 646 - DNA, 16 bp, Artificial Sequence
  Synthetic oligonucleotide
acacctaataagctat

SEQ ID NO: 647 - DNA, 16 bp, Artificial Sequence
  Synthetic oligonucleotide
cttcaacacctaataa

SEQ ID NO: 648 - DNA, 16 bp, Artificial Sequence
  Synthetic oligonucleotide
ctcttcaacacctaat

SEQ ID NO: 649 - DNA, 16 bp, Artificial Sequence
  Synthetic oligonucleotide
gtctcttcaacaccta

SEQ ID NO: 650 - DNA, 16 bp, Artificial Sequence
  Synthetic oligonucleotide
ggccttgcaaccttgg

SEQ ID NO: 651 - DNA, 16 bp, Artificial Sequence
  Synthetic oligonucleotide
aaaggttcacacaggg

SEQ ID NO: 652 - DNA, 16 bp, Artificial Sequence
  Synthetic oligonucleotide
tcaaaggttcacacag

SEQ ID NO: 653 - DNA, 16 bp, Artificial Sequence
  Synthetic oligonucleotide
aagctcaaaggttcac

SEQ ID NO: 654 - DNA, 16 bp, Artificial Sequence
  Synthetic oligonucleotide
atgaaagctcaaaggt

SEQ ID NO: 655 - DNA, 16 bp, Artificial Sequence
  Synthetic oligonucleotide
tctctatgaaagctca

SEQ ID NO: 656 - DNA, 16 bp, Artificial Sequence
  Synthetic oligonucleotide
actctctatgaaagct

SEQ ID NO: 657 - DNA, 16 bp, Artificial Sequence
  Synthetic oligonucleotide
aaactctctatgaaag

SEQ ID NO: 658 - DNA, 16 bp, Artificial Sequence
  Synthetic oligonucleotide
atgctgtgaaactctc

SEQ ID NO: 659 - DNA, 16 bp, Artificial Sequence
  Synthetic oligonucleotide
ccatgctgtgaaactc

SEQ ID NO: 660 - DNA, 16 bp, Artificial Sequence
  Synthetic oligonucleotide
cacagtccatgctgtg

SEQ ID NO: 661 - DNA, 16 bp, Artificial Sequence
  Synthetic oligonucleotide
gacacagtccatgctg

SEQ ID NO: 662 - DNA, 16 bp, Artificial Sequence
  Synthetic oligonucleotide
acactggatgaccgtg

SEQ ID NO: 663 - DNA, 16 bp, Artificial Sequence
  Synthetic oligonucleotide
caacactggatgaccg

SEQ ID NO: 664 - DNA, 16 bp, Artificial Sequence
  Synthetic oligonucleotide
caatgcatgacaacac

SEQ ID NO: 665 - DNA, 16 bp, Artificial Sequence
  Synthetic oligonucleotide
accaatgcatgacaac

SEQ ID NO: 666 - DNA, 16 bp, Artificial Sequence
  Synthetic oligonucleotide
actaaccaatgcatga

SEQ ID NO: 667 - DNA, 16 bp, Artificial Sequence
  Synthetic oligonucleotide
tgactaaccaatgcat

SEQ ID NO: 668 - DNA, 16 bp, Artificial Sequence
  Synthetic oligonucleotide
cattttgactaaccaa

SEQ ID NO: 669 - DNA, 16 bp, Artificial Sequence
  Synthetic oligonucleotide
ccaaactgccctagtc

SEQ ID NO: 670 - DNA, 16 bp, Artificial Sequence
  Synthetic oligonucleotide
atccaaactgccctag

SEQ ID NO: 671 - DNA, 16 bp, Artificial Sequence
  Synthetic oligonucleotide
gttgagctatccaaac

SEQ ID NO: 672 - DNA, 16 bp, Artificial Sequence
  Synthetic oligonucleotide
cttgttgagctatcca

SEQ ID NO: 673 - DNA, 16 bp, Artificial Sequence
  Synthetic oligonucleotide
gtatcttgttgagcta

SEQ ID NO: 674 - DNA, 16 bp, Artificial Sequence
  Synthetic oligonucleotide
ttgtatcttgttgagc

SEQ ID NO: 675 - DNA, 16 bp, Artificial Sequence
  Synthetic oligonucleotide
ttgtcagcaggaccac

SEQ ID NO: 676 - DNA, 16 bp, Artificial Sequence
  Synthetic oligonucleotide
atttgtcagcaggacc

SEQ ID NO: 677 - DNA, 16 bp, Artificial Sequence
  Synthetic oligonucleotide
ttgatttgtcagcagg

SEQ ID NO: 678 - DNA, 16 bp, Artificial Sequence
  Synthetic oligonucleotide
ctcttgatttgtcagc

SEQ ID NO: 679 - DNA, 16 bp, Artificial Sequence
  Synthetic oligonucleotide
atctcaacttttgagt

SEQ ID NO: 680 - DNA, 16 bp, Artificial Sequence
  Synthetic oligonucleotide
accaccccaaaatctc

SEQ ID NO: 681 - DNA, 16 bp, Artificial Sequence
  Synthetic oligonucleotide
aatgtcttggcacacc

SEQ ID NO: 682 - DNA, 16 bp, Artificial Sequence
  Synthetic oligonucleotide
taatgtcttggcacac

SEQ ID NO: 683 - DNA, 16 bp, Artificial Sequence
  Synthetic oligonucleotide
ttaatgtcttggcaca

SEQ ID NO: 684 - DNA, 16 bp, Artificial Sequence
  Synthetic oligonucleotide
attaatgtcttggcac

SEQ ID NO: 685 - DNA, 16 bp, Artificial Sequence
  Synthetic oligonucleotide
aattaatgtcttggca

SEQ ID NO: 686 - DNA, 16 bp, Artificial Sequence
  Synthetic oligonucleotide
aaattaatgtcttggc

SEQ ID NO: 687 - DNA, 16 bp, Artificial Sequence
  Synthetic oligonucleotide
ctagagattgtaaaac

SEQ ID NO: 688 - DNA, 16 bp, Artificial Sequence
  Synthetic oligonucleotide
acctagagattgtaaa

SEQ ID NO: 689 - DNA, 16 bp, Artificial Sequence
  Synthetic oligonucleotide
tagccaaacctagaga

SEQ ID NO: 690 - DNA, 16 bp, Artificial Sequence
  Synthetic oligonucleotide
tgttaagagaactagc

SEQ ID NO: 691 - DNA, 16 bp, Artificial Sequence
  Synthetic oligonucleotide
taaccagtgttaagag

SEQ ID NO: 692 - DNA, 16 bp, Artificial Sequence
  Synthetic oligonucleotide
gaaaagtgtttatgca

SEQ ID NO: 693 - DNA, 16 bp, Artificial Sequence
  Synthetic oligonucleotide
tcctagtccagtgata

SEQ ID NO: 694 - DNA, 16 bp, Artificial Sequence
  Synthetic oligonucleotide
cacctatctagaacct

SEQ ID NO: 695 - DNA, 16 bp, Artificial Sequence
  Synthetic oligonucleotide
caaaatcagagtccta

SEQ ID NO: 696 - DNA, 16 bp, Artificial Sequence
  Synthetic oligonucleotide
caaataagtgtatcct

SEQ ID NO: 697 - DNA, 16 bp, Artificial Sequence
  Synthetic oligonucleotide
gcttgacaaataagtg

SEQ ID NO: 698 - DNA, 16 bp, Artificial Sequence
  Synthetic oligonucleotide
taggttaaaaatttac

SEQ ID NO: 699 - DNA, 16 bp, Artificial Sequence
  Synthetic oligonucleotide
ttacagattgtgctga

SEQ ID NO: 700 - DNA, 16 bp, Artificial Sequence
  Synthetic oligonucleotide
aaacctagagattgta

SEQ ID NO: 701 - DNA, 16 bp, Artificial Sequence
  Synthetic oligonucleotide
actagccaaacctaga

SEQ ID NO: 702 - DNA, 16 bp, Artificial Sequence
  Synthetic oligonucleotide
gaactagccaaaccta

SEQ ID NO: 703 - DNA, 16 bp, Artificial Sequence
  Synthetic oligonucleotide
aagagaactagccaaa

SEQ ID NO: 704 - DNA, 16 bp, Artificial Sequence
  Synthetic oligonucleotide
taagagaactagccaa

SEQ ID NO: 705 - DNA, 16 bp, Artificial Sequence
  Synthetic oligonucleotide
ttaagagaactagcca

SEQ ID NO: 706 - DNA, 16 bp, Artificial Sequence
  Synthetic oligonucleotide
gttaagagaactagcc

SEQ ID NO: 707 - DNA, 16 bp, Artificial Sequence
  Synthetic oligonucleotide
gtgttaagagaactag

SEQ ID NO: 708 - DNA, 16 bp, Artificial Sequence
  Synthetic oligonucleotide
agtgttaagagaacta

SEQ ID NO: 709 - DNA, 16 bp, Artificial Sequence
  Synthetic oligonucleotide
cagtgttaagagaact

SEQ ID NO: 710 - DNA, 16 bp, Artificial Sequence
  Synthetic oligonucleotide
ccagtgttaagagaac

SEQ ID NO: 711 - DNA, 16 bp, Artificial Sequence
  Synthetic oligonucleotide
ttaaccagtgttaaga

SEQ ID NO: 712 - DNA, 16 bp, Artificial Sequence
  Synthetic oligonucleotide
tttaaccagtgttaag

SEQ ID NO: 713 - DNA, 16 bp, Artificial Sequence
  Synthetic oligonucleotide
gcaatgttaatttaac

SEQ ID NO: 714 - DNA, 16 bp, Artificial Sequence
  Synthetic oligonucleotide
gtttatgcaatgttaa

SEQ ID NO: 715 - DNA, 16 bp, Artificial Sequence
  Synthetic oligonucleotide
gtgtttatgcaatgtt

SEQ ID NO: 716 - DNA, 16 bp, Artificial Sequence
  Synthetic oligonucleotide
cagacttgaaaagtgt

SEQ ID NO: 717 - DNA, 16 bp, Artificial Sequence
  Synthetic oligonucleotide
aaatatggatcagact

SEQ ID NO: 718 - DNA, 16 bp, Artificial Sequence
  Synthetic oligonucleotide
ttaaatatggatcaga

SEQ ID NO: 719 - DNA, 16 bp, Artificial Sequence
  Synthetic oligonucleotide
tattaaatatggatca

SEQ ID NO: 720 - DNA, 16 bp, Artificial Sequence
  Synthetic oligonucleotide
tatcaaaaggattgtt

SEQ ID NO: 721 - DNA, 16 bp, Artificial Sequence
  Synthetic oligonucleotide
tttatcaaaaggattg

SEQ ID NO: 722 - DNA, 16 bp, Artificial Sequence
  Synthetic oligonucleotide
acctcaccatgccatc

SEQ ID NO: 723 - DNA, 16 bp, Artificial Sequence
  Synthetic oligonucleotide
tactttcacctcacca

SEQ ID NO: 724 - DNA, 16 bp, Artificial Sequence
  Synthetic oligonucleotide
gatactttcacctcac

SEQ ID NO: 725 - DNA, 16 bp, Artificial Sequence
  Synthetic oligonucleotide
ccagtgatactttcac

SEQ ID NO: 726 - DNA, 16 bp, Artificial Sequence
  Synthetic oligonucleotide
agtccagtgatacttt

SEQ ID NO: 727 - DNA, 16 bp, Artificial Sequence
  Synthetic oligonucleotide
tagtccagtgatactt

SEQ ID NO: 728 - DNA, 16 bp, Artificial Sequence
  Synthetic oligonucleotide
ctagtccagtgatact

SEQ ID NO: 729 - DNA, 16 bp, Artificial Sequence
  Synthetic oligonucleotide
ttcctagtccagtgat

SEQ ID NO: 730 - DNA, 16 bp, Artificial Sequence
  Synthetic oligonucleotide
caccttcttcctagtc

SEQ ID NO: 731 - DNA, 16 bp, Artificial Sequence
  Synthetic oligonucleotide
aacctaagtcaccttc

SEQ ID NO: 732 - DNA, 16 bp, Artificial Sequence
  Synthetic oligonucleotide
agaacctaagtcacct

SEQ ID NO: 733 - DNA, 16 bp, Artificial Sequence
  Synthetic oligonucleotide
ctagaacctaagtcac

SEQ ID NO: 734 - DNA, 16 bp, Artificial Sequence
  Synthetic oligonucleotide
cctatctagaacctaa

SEQ ID NO: 735 - DNA, 16 bp, Artificial Sequence
  Synthetic oligonucleotide
agacacctatctagaa

SEQ ID NO: 736 - DNA, 16 bp, Artificial Sequence
  Synthetic oligonucleotide
taaaagacacctatct

SEQ ID NO: 737 - DNA, 16 bp, Artificial Sequence
  Synthetic oligonucleotide
cctaaaagacacctat

SEQ ID NO: 738 - DNA, 16 bp, Artificial Sequence
  Synthetic oligonucleotide
gtcctaaaagacacct

SEQ ID NO: 739 - DNA, 16 bp, Artificial Sequence
  Synthetic oligonucleotide
agagtcctaaaagaca

SEQ ID NO: 740 - DNA, 16 bp, Artificial Sequence
  Synthetic oligonucleotide
ctcaaaatcagagtcc

SEQ ID NO: 741 - DNA, 16 bp, Artificial Sequence
  Synthetic oligonucleotide
tgtcctcaaaatcaga

SEQ ID NO: 742 - DNA, 16 bp, Artificial Sequence
  Synthetic oligonucleotide
taagtgatgtcctcaa

SEQ ID NO: 743 - DNA, 16 bp, Artificial Sequence
  Synthetic oligonucleotide
gatagtaagtgatgtc

SEQ ID NO: 744 - DNA, 16 bp, Artificial Sequence
  Synthetic oligonucleotide
aaatggatagtaagtg

SEQ ID NO: 745 - DNA, 16 bp, Artificial Sequence
  Synthetic oligonucleotide
gaagaaatggatagta

SEQ ID NO: 746 - DNA, 16 bp, Artificial Sequence
  Synthetic oligonucleotide
gacttcttttaacatg

SEQ ID NO: 747 - DNA, 16 bp, Artificial Sequence
  Synthetic oligonucleotide
gatgacttcttttaac

SEQ ID NO: 748 - DNA, 16 bp, Artificial Sequence
  Synthetic oligonucleotide
agtttgagatgacttc

SEQ ID NO: 749 - DNA, 16 bp, Artificial Sequence
  Synthetic oligonucleotide
agagtttgagatgact

SEQ ID NO: 750 - DNA, 16 bp, Artificial Sequence
  Synthetic oligonucleotide
ctaagagtttgagatg

SEQ ID NO: 751 - DNA, 16 bp, Artificial Sequence
  Synthetic oligonucleotide
taaattacatagttgt

SEQ ID NO: 752 - DNA, 16 bp, Artificial Sequence
  Synthetic oligonucleotide
atccttatgtaaatgg

SEQ ID NO: 753 - DNA, 16 bp, Artificial Sequence
  Synthetic oligonucleotide
gtatccttatgtaaat

SEQ ID NO: 754 - DNA, 16 bp, Artificial Sequence
  Synthetic oligonucleotide
gtgtatccttatgtaa

SEQ ID NO: 755 - DNA, 16 bp, Artificial Sequence
  Synthetic oligonucleotide
aataagtgtatcctta

SEQ ID NO: 756 - DNA, 16 bp, Artificial Sequence
  Synthetic oligonucleotide
gacaaataagtgtatc

SEQ ID NO: 757 - DNA, 16 bp, Artificial Sequence
  Synthetic oligonucleotide
agcttgacaaataagt

SEQ ID NO: 758 - DNA, 16 bp, Artificial Sequence
  Synthetic oligonucleotide
gagcttgacaaataag

SEQ ID NO: 759 - DNA, 16 bp, Artificial Sequence
  Synthetic oligonucleotide
gctgagcttgacaaat

SEQ ID NO: 760 - DNA, 16 bp, Artificial Sequence
  Synthetic oligonucleotide
tgctgagcttgacaaa

SEQ ID NO: 761 - DNA, 16 bp, Artificial Sequence
  Synthetic oligonucleotide
gattgtgctgagcttg

SEQ ID NO: 762 - DNA, 16 bp, Artificial Sequence
  Synthetic oligonucleotide
agattgtgctgagctt

SEQ ID NO: 763 - DNA, 16 bp, Artificial Sequence
  Synthetic oligonucleotide
acagattgtgctgagc

SEQ ID NO: 764 - DNA, 16 bp, Artificial Sequence
  Synthetic oligonucleotide
tacagattgtgctgag

SEQ ID NO: 765 - DNA, 16 bp, Artificial Sequence
  Synthetic oligonucleotide
aatttacagattgtgc

SEQ ID NO: 766 - DNA, 16 bp, Artificial Sequence
  Synthetic oligonucleotide
tggtgaatatcttcaa

SEQ ID NO: 767 - DNA, 16 bp, Artificial Sequence
  Synthetic oligonucleotide
tgctaataatttagtg

SEQ ID NO: 768 - DNA, 16 bp, Artificial Sequence
  Synthetic oligonucleotide
caaatgctaataattt

SEQ ID NO: 769 - DNA, 16 bp, Artificial Sequence
  Synthetic oligonucleotide
gtttcacatagcaatt

SEQ ID NO: 770 - DNA, 16 bp, Artificial Sequence
  Synthetic oligonucleotide
gtagtttcacatagca

SEQ ID NO: 771 - DNA, 16 bp, Artificial Sequence
  Synthetic oligonucleotide
ctgtagtttcacatag

SEQ ID NO: 772 - DNA, 16 bp, Artificial Sequence
  Synthetic oligonucleotide
gtgaatatcttcaaat

SEQ ID NO: 773 - DNA, 16 bp, Artificial Sequence
  Synthetic oligonucleotide
atggtgaatatcttca

SEQ ID NO: 774 - DNA, 16 bp, Artificial Sequence
  Synthetic oligonucleotide
taatggtgaatatctt

SEQ ID NO: 775 - DNA, 16 bp, Artificial Sequence
  Synthetic oligonucleotide
ataatggtgaatatct

SEQ ID NO: 776 - DNA, 16 bp, Artificial Sequence
  Synthetic oligonucleotide
tactagtatgccttaa

SEQ ID NO: 777 - DNA, 16 bp, Artificial Sequence
  Synthetic oligonucleotide
tgtactagtatgcctt

SEQ ID NO: 778 - DNA, 16 bp, Artificial Sequence
  Synthetic oligonucleotide
cttgtactagtatgcc

SEQ ID NO: 779 - DNA, 16 bp, Artificial Sequence
  Synthetic oligonucleotide
acttgtactagtatgc

SEQ ID NO: 780 - DNA, 16 bp, Artificial Sequence
  Synthetic oligonucleotide
aatgctaataatttag

SEQ ID NO: 781 - DNA, 16 bp, Artificial Sequence
  Synthetic oligonucleotide
aaatgctaataattta

SEQ ID NO: 782 - DNA, 16 bp, Artificial Sequence
  Synthetic oligonucleotide
acaaatgctaataatt

SEQ ID NO: 783 - DNA, 16 bp, Artificial Sequence
  Synthetic oligonucleotide
aacaaatgctaataat

SEQ ID NO: 784 - DNA, 16 bp, Artificial Sequence
  Synthetic oligonucleotide
aaacaaatgctaataa

SEQ ID NO: 785 - DNA, 16 bp, Artificial Sequence
  Synthetic oligonucleotide
aaaacaaatgctaata

SEQ ID NO: 786 - DNA, 16 bp, Artificial Sequence
  Synthetic oligonucleotide
taaaacaaatgctaat

SEQ ID NO: 787 - DNA, 16 bp, Artificial Sequence
  Synthetic oligonucleotide
ctaaaacaaatgctaa

SEQ ID NO: 788 - DNA, 16 bp, Artificial Sequence
  Synthetic oligonucleotide
ggtaaaagctaacagt

SEQ ID NO: 789 - DNA, 16 bp, Artificial Sequence
  Synthetic oligonucleotide
aaggtaaaagctaaca

SEQ ID NO: 790 - DNA, 16 bp, Artificial Sequence
  Synthetic oligonucleotide
ccatttatgtgactag

SEQ ID NO: 791 - DNA, 16 bp, Artificial Sequence
  Synthetic oligonucleotide
atccatttatgtgact

SEQ ID NO: 792 - DNA, 16 bp, Artificial Sequence
  Synthetic oligonucleotide
aatccatttatgtgac

SEQ ID NO: 793 - DNA, 16 bp, Artificial Sequence
  Synthetic oligonucleotide
taatccatttatgtga

SEQ ID NO: 794 - DNA, 16 bp, Artificial Sequence
  Synthetic oligonucleotide
ttaatccatttatgtg

SEQ ID NO: 795 - DNA, 16 bp, Artificial Sequence
  Synthetic oligonucleotide
attaatccatttatgt

SEQ ID NO: 796 - DNA, 16 bp, Artificial Sequence
  Synthetic oligonucleotide
aattaatccatttatg

SEQ ID NO: 797 - DNA, 16 bp, Artificial Sequence
  Synthetic oligonucleotide
taattaatccatttat

SEQ ID NO: 798 - DNA, 16 bp, Artificial Sequence
  Synthetic oligonucleotide
atagtttccattgcct

SEQ ID NO: 799 - DNA, 16 bp, Artificial Sequence
  Synthetic oligonucleotide
taatagtttccattgc

SEQ ID NO: 800 - DNA, 16 bp, Artificial Sequence
  Synthetic oligonucleotide
agtttcacatagcaat

SEQ ID NO: 801 - DNA, 16 bp, Artificial Sequence
  Synthetic oligonucleotide
tagtttcacatagcaa

SEQ ID NO: 802 - DNA, 16 bp, Artificial Sequence
  Synthetic oligonucleotide
tgtagtttcacatagc

SEQ ID NO: 803 - DNA, 16 bp, Artificial Sequence
  Synthetic oligonucleotide
tgctgtgaaactctct

SEQ ID NO: 804 - DNA, 16 bp, Artificial Sequence
  Synthetic oligonucleotide
tcttgatttgtcagca

SEQ ID NO: 805 - DNA, 16 bp, Artificial Sequence
  Synthetic oligonucleotide
catgtaaatatagccc

SEQ ID NO: 806 - DNA, 16 bp, Artificial Sequence
  Synthetic oligonucleotide
taataatccccatttc

SEQ ID NO: 807 - DNA, 16 bp, Artificial Sequence
  Synthetic oligonucleotide
ataataatccccattt

SEQ ID NO: 808 - DNA, 16 bp, Artificial Sequence
  Synthetic oligonucleotide
tataataatccccatt

SEQ ID NO: 809 - DNA, 16 bp, Artificial Sequence
  Synthetic oligonucleotide
tgtaaatatagcccca

SEQ ID NO: 810 - DNA, 16 bp, Artificial Sequence
  Synthetic oligonucleotide
ctctatgaaagctcaa

SEQ ID NO: 811 - DNA, 16 bp, Artificial Sequence
  Synthetic oligonucleotide
ctctctatgaaagctc

SEQ ID NO: 812 - DNA, 16 bp, Artificial Sequence
  Synthetic oligonucleotide
tgtgaaactctctatg

SEQ ID NO: 813 - DNA, 16 bp, Artificial Sequence
  Synthetic oligonucleotide
ctgtgaaactctctat

SEQ ID NO: 814 - DNA, 16 bp, Artificial Sequence
  Synthetic oligonucleotide
gctgtgaaactctcta

SEQ ID NO: 815 - DNA, 16 bp, Artificial Sequence
  Synthetic oligonucleotide
catgctgtgaaactct

SEQ ID NO: 816 - DNA, 16 bp, Artificial Sequence
  Synthetic oligonucleotide
tgttgagctatccaaa

SEQ ID NO: 817 - DNA, 16 bp, Artificial Sequence
  Synthetic oligonucleotide
ttgttgagctatccaa

SEQ ID NO: 818 - DNA, 16 bp, Artificial Sequence
  Synthetic oligonucleotide
tcttgttgagctatcc

SEQ ID NO: 819 - DNA, 16 bp, Artificial Sequence
  Synthetic oligonucleotide
tatcttgttgagctat

SEQ ID NO: 820 - DNA, 16 bp, Artificial Sequence
  Synthetic oligonucleotide
tgtatcttgttgagct

SEQ ID NO: 821 - DNA, 16 bp, Artificial Sequence
  Synthetic oligonucleotide
tgatttgtcagcagga

SEQ ID NO: 822 - DNA, 16 bp, Artificial Sequence
  Synthetic oligonucleotide
aaaattaatgtcttgg

SEQ ID NO: 823 - DNA, 16 bp, Artificial Sequence
  Synthetic oligonucleotide
aaaaattaatgtcttg

SEQ ID NO: 824 - DNA, 16 bp, Artificial Sequence
  Synthetic oligonucleotide
aaaaaattaatgtctt

SEQ ID NO: 825 - DNA, 16 bp, Artificial Sequence
  Synthetic oligonucleotide
aaaaaaattaatgtct

SEQ ID NO: 826 - DNA, 16 bp, Artificial Sequence
  Synthetic oligonucleotide
aaaaaaaattaatgtc

SEQ ID NO: 827 - DNA, 16 bp, Artificial Sequence
  Synthetic oligonucleotide
aaaaaaaaattaatgt

SEQ ID NO: 828 - DNA, 16 bp, Artificial Sequence
  Synthetic oligonucleotide
aaaaaaaaaattaatg

SEQ ID NO: 829 - DNA, 16 bp, Artificial Sequence
  Synthetic oligonucleotide
taaaaaaaaaattaat

SEQ ID NO: 830 - DNA, 16 bp, Artificial Sequence
  Synthetic oligonucleotide
ttaaaaaaaaaattaa

SEQ ID NO: 831 - DNA, 16 bp, Artificial Sequence
  Synthetic oligonucleotide
tttaaaaaaaaaatta

SEQ ID NO: 832 - DNA, 16 bp, Artificial Sequence
  Synthetic oligonucleotide
gtttaaaaaaaaaatt

SEQ ID NO: 833 - DNA, 16 bp, Artificial Sequence
  Synthetic oligonucleotide
tgtttaaaaaaaaaat

SEQ ID NO: 834 - DNA, 16 bp, Artificial Sequence
  Synthetic oligonucleotide
ttgtttaaaaaaaaaa

SEQ ID NO: 835 - DNA, 16 bp, Artificial Sequence
  Synthetic oligonucleotide
attgtttaaaaaaaaa

SEQ ID NO: 836 - DNA, 16 bp, Artificial Sequence
  Synthetic oligonucleotide
cattgtttaaaaaaaa

SEQ ID NO: 837 - DNA, 16 bp, Artificial Sequence
  Synthetic oligonucleotide
tcattgtttaaaaaaa

SEQ ID NO: 838 - DNA, 16 bp, Artificial Sequence
  Synthetic oligonucleotide
ttcattgtttaaaaaa

SEQ ID NO: 839 - DNA, 16 bp, Artificial Sequence
  Synthetic oligonucleotide
cttcattgtttaaaaa

SEQ ID NO: 840 - DNA, 16 bp, Artificial Sequence
  Synthetic oligonucleotide
acttcattgtttaaaa

SEQ ID NO: 841 - DNA, 16 bp, Artificial Sequence
  Synthetic oligonucleotide
cacttcattgtttaaa

SEQ ID NO: 842 - DNA, 16 bp, Artificial Sequence
  Synthetic oligonucleotide
gggaattacaagtatt

SEQ ID NO: 843 - DNA, 16 bp, Artificial Sequence
  Synthetic oligonucleotide
tgtgcaatggtgacaa

SEQ ID NO: 844 - DNA, 16 bp, Artificial Sequence
  Synthetic oligonucleotide
aaatcttatggttagg

SEQ ID NO: 845 - DNA, 16 bp, Artificial Sequence
  Synthetic oligonucleotide
gtgcaatggtgacaac

SEQ ID NO: 846 - DNA, 16 bp, Artificial Sequence
  Synthetic oligonucleotide
attgtgcaatggtgac

SEQ ID NO: 847 - DNA, 16 bp, Artificial Sequence
  Synthetic oligonucleotide
aaattgtgcaatggtg

SEQ ID NO: 848 - DNA, 16 bp, Artificial Sequence
  Synthetic oligonucleotide
aaccagtgttaagaga

SEQ ID NO: 849 - DNA, 16 bp, Artificial Sequence
  Synthetic oligonucleotide
tgcaatgttaatttaa

SEQ ID NO: 850 - DNA, 16 bp, Artificial Sequence
  Synthetic oligonucleotide
atgcaatgttaattta

SEQ ID NO: 851 - DNA, 16 bp, Artificial Sequence
  Synthetic oligonucleotide
tatgcaatgttaattt

SEQ ID NO: 852 - DNA, 16 bp, Artificial Sequence
  Synthetic oligonucleotide
ttatgcaatgttaatt

SEQ ID NO: 853 - DNA, 16 bp, Artificial Sequence
  Synthetic oligonucleotide
tttatgcaatgttaat

SEQ ID NO: 854 - DNA, 16 bp, Artificial Sequence
  Synthetic oligonucleotide
tgtttatgcaatgtta

SEQ ID NO: 855 - DNA, 16 bp, Artificial Sequence
  Synthetic oligonucleotide
agtgtttatgcaatgt

SEQ ID NO: 856 - DNA, 16 bp, Artificial Sequence
  Synthetic oligonucleotide
aagtgtttatgcaatg

SEQ ID NO: 857 - DNA, 16 bp, Artificial Sequence
  Synthetic oligonucleotide
aaaagtgtttatgcaa

SEQ ID NO: 858 - DNA, 16 bp, Artificial Sequence
  Synthetic oligonucleotide
tgaaaagtgtttatgc

SEQ ID NO: 859 - DNA, 16 bp, Artificial Sequence
  Synthetic oligonucleotide
ttgaaaagtgtttatg

SEQ ID NO: 860 - DNA, 16 bp, Artificial Sequence
  Synthetic oligonucleotide
cttgaaaagtgtttat

SEQ ID NO: 861 - DNA, 16 bp, Artificial Sequence
  Synthetic oligonucleotide
acttgaaaagtgttta

SEQ ID NO: 862 - DNA, 16 bp, Artificial Sequence
  Synthetic oligonucleotide
gacttgaaaagtgttt

SEQ ID NO: 863 - DNA, 16 bp, Artificial Sequence
  Synthetic oligonucleotide
agacttgaaaagtgtt

SEQ ID NO: 864 - DNA, 16 bp, Artificial Sequence
  Synthetic oligonucleotide
ttaggggaattacaag

SEQ ID NO: 865 - DNA, 16 bp, Artificial Sequence
  Synthetic oligonucleotide
ggttaggggaattaca

SEQ ID NO: 866 - DNA, 16 bp, Artificial Sequence
  Synthetic oligonucleotide
atggttaggggaatta

SEQ ID NO: 867 - DNA, 16 bp, Artificial Sequence
  Synthetic oligonucleotide
ttatggttaggggaat

SEQ ID NO: 868 - DNA, 16 bp, Artificial Sequence
  Synthetic oligonucleotide
tcttatggttagggga

SEQ ID NO: 869 - DNA, 16 bp, Artificial Sequence
  Synthetic oligonucleotide
atcttatggttagggg

SEQ ID NO: 870 - DNA, 16 bp, Artificial Sequence
  Synthetic oligonucleotide
ttgtgcaatggtgaca

SEQ ID NO: 871 - DNA, 16 bp, Artificial Sequence
  Synthetic oligonucleotide
aattgtgcaatggtga

SEQ ID NO: 872 - DNA, 16 bp, Artificial Sequence
  Synthetic oligonucleotide
cttgatttgtcagcag

SEQ ID NO: 873 - DNA, 16 bp, Artificial Sequence
  Synthetic oligonucleotide
accagtgttaagagaa

SEQ ID NO: 874 - DNA, 16 bp, Artificial Sequence
  Synthetic oligonucleotide
cttgatttgtcagcag

SEQ ID NO: 875 - DNA, 16 bp, Artificial Sequence
  Synthetic oligonucleotide
accagtgttaagagaa

SEQ ID NO: 876 - DNA, 16 bp, Artificial Sequence
  Synthetic oligonucleotide
cttgatttgtcagcag

SEQ ID NO: 877 - DNA, 16 bp, Artificial Sequence
  Synthetic oligonucleotide
accagtgttaagagaa

SEQ ID NO: 878 - DNA, 16 bp, Artificial Sequence
  Synthetic oligonucleotide
cttgatttgtcagcag

SEQ ID NO: 879 - DNA, 16 bp, Artificial Sequence
  Synthetic oligonucleotide
accagtgttaagagaa

SEQ ID NO: 880 - DNA, 16 bp, Artificial Sequence
  Synthetic oligonucleotide
cttgatttgtcagcag

SEQ ID NO: 881 - DNA, 16 bp, Artificial Sequence
  Synthetic oligonucleotide
accagtgttaagagaa

SEQ ID NO: 882 - DNA, 16 bp, Artificial Sequence
  Synthetic oligonucleotide
cttgatttgtcagcag

SEQ ID NO: 883 - DNA, 16 bp, Artificial Sequence
  Synthetic oligonucleotide
accagtgttaagagaa

SEQ ID NO: 884 - DNA, 16 bp, Artificial Sequence
  Synthetic oligonucleotide
cttgatttgtcagcag

SEQ ID NO: 885 - DNA, 16 bp, Artificial Sequence
  Synthetic oligonucleotide
accagtgttaagagaa

SEQ ID NO: 886 - DNA, 16 bp, Artificial Sequence
  Synthetic oligonucleotide
cttgatttgtcagcag

SEQ ID NO: 887 - DNA, 16 bp, Artificial Sequence
  Synthetic oligonucleotide
accagtgttaagagaa

SEQ ID NO: 888 - DNA, 16 bp, Artificial Sequence
  Synthetic oligonucleotide
cttgatttgtcagcag

SEQ ID NO: 889 - DNA, 16 bp, Artificial Sequence
  Synthetic oligonucleotide
accagtgttaagagaa

SEQ ID NO: 890 - DNA, 16 bp, Artificial Sequence
  Synthetic oligonucleotide
ttgatttgtcagcagg

SEQ ID NO: 891 - DNA, 16 bp, Artificial Sequence
  Synthetic oligonucleotide
ccagtgttaagagaac

SEQ ID NO: 892 - DNA, 16 bp, Artificial Sequence
  Synthetic oligonucleotide
ttgatttgtcagcagg

SEQ ID NO: 893 - DNA, 16 bp, Artificial Sequence
  Synthetic oligonucleotide
ccagtgttaagagaac

SEQ ID NO: 894 - DNA, 16 bp, Artificial Sequence
  Synthetic oligonucleotide
ttgatttgtcagcagg

SEQ ID NO: 895 - DNA, 16 bp, Artificial Sequence
  Synthetic oligonucleotide
ccagtgttaagagaac

SEQ ID NO: 896 - DNA, 16 bp, Artificial Sequence
  Synthetic oligonucleotide
ttgatttgtcagcagg

SEQ ID NO: 897 - DNA, 16 bp, Artificial Sequence
  Synthetic oligonucleotide
ccagtgttaagagaac

SEQ ID NO: 898 - DNA, 16 bp, Artificial Sequence
  Synthetic oligonucleotide
ttgatttgtcagcagg

SEQ ID NO: 899 - DNA, 16 bp, Artificial Sequence
  Synthetic oligonucleotide
ccagtgttaagagaac

SEQ ID NO: 900 - DNA, 16 bp, Artificial Sequence
  Synthetic oligonucleotide
ttgatttgtcagcagg

SEQ ID NO: 901 - DNA, 16 bp, Artificial Sequence
  Synthetic oligonucleotide
ccagtgttaagagaac

SEQ ID NO: 902 - DNA, 16 bp, Artificial Sequence
  Synthetic oligonucleotide
tgatttgtcagcagga

SEQ ID NO: 903 - DNA, 16 bp, Artificial Sequence
  Synthetic oligonucleotide
cagtgttaagagaact

SEQ ID NO: 904 - DNA, 16 bp, Artificial Sequence
  Synthetic oligonucleotide
tgatttgtcagcagga

SEQ ID NO: 905 - DNA, 16 bp, Artificial Sequence
  Synthetic oligonucleotide
cagtgttaagagaact

SEQ ID NO: 906 - DNA, 16 bp, Artificial Sequence
  Synthetic oligonucleotide
tgatttgtcagcagga

SEQ ID NO: 907 - DNA, 16 bp, Artificial Sequence
  Synthetic oligonucleotide
cagtgttaagagaact

SEQ ID NO: 908 - DNA, 16 bp, Artificial Sequence
  Synthetic oligonucleotide
tccagtgatactttca

SEQ ID NO: 909 - DNA, 16 bp, Artificial Sequence
  Synthetic oligonucleotide
gagaatggatattcaa

SEQ ID NO: 910 - DNA, 16 bp, Artificial Sequence
  Synthetic oligonucleotide
agatatccacagcagc

SEQ ID NO: 911 - DNA, 16 bp, Artificial Sequence
  Synthetic oligonucleotide
attagtgattaggtca

SEQ ID NO: 912 - DNA, 16 bp, Artificial Sequence
  Synthetic oligonucleotide
gttctgtctattcata

SEQ ID NO: 913 - DNA, 16 bp, Artificial Sequence
  Synthetic oligonucleotide
cagattgtgctgagct

SEQ ID NO: 914 - DNA, 16 bp, Artificial Sequence
  Synthetic oligonucleotide
atggtgtaacataggt

SEQ ID NO: 915 - DNA, 16 bp, Artificial Sequence
  Synthetic oligonucleotide
acgagaatggatattc

SEQ ID NO: 916 - DNA, 16 bp, Artificial Sequence
  Synthetic oligonucleotide
caagatgacactaata

SEQ ID NO: 917 - DNA, 16 bp, Artificial Sequence
  Synthetic oligonucleotide
ggcaagatgacactaa

SEQ ID NO: 918 - DNA, 16 bp, Artificial Sequence
  Synthetic oligonucleotide
gaggcaagatgacact

SEQ ID NO: 919 - DNA, 16 bp, Artificial Sequence
  Synthetic oligonucleotide
ggagatatccacagca

SEQ ID NO: 920 - DNA, 16 bp, Artificial Sequence
  Synthetic oligonucleotide
atttctgatgtgactc

SEQ ID NO: 921 - DNA, 16 bp, Artificial Sequence
  Synthetic oligonucleotide
gggcatttctgatgtg

SEQ ID NO: 922 - DNA, 16 bp, Artificial Sequence
  Synthetic oligonucleotide
atgtagggcatttctg

SEQ ID NO: 923 - DNA, 16 bp, Artificial Sequence
  Synthetic oligonucleotide
agtgattaggtcaaat

SEQ ID NO: 924 - DNA, 16 bp, Artificial Sequence
  Synthetic oligonucleotide
ttagtgattaggtcaa

SEQ ID NO: 925 - DNA, 16 bp, Artificial Sequence
  Synthetic oligonucleotide
gtctattcataccagg

SEQ ID NO: 926 - DNA, 16 bp, Artificial Sequence
  Synthetic oligonucleotide
ggtgtaacataggtta

SEQ ID NO: 927 - DNA, 16 bp, Artificial Sequence
  Synthetic oligonucleotide
tggtgtaacataggtt

SEQ ID NO: 928 - DNA, 16 bp, Artificial Sequence
  Synthetic oligonucleotide
gatggtgtaacatagg

SEQ ID NO: 929 - DNA, 16 bp, Artificial Sequence
  Synthetic oligonucleotide
agatggtgtaacatag

SEQ ID NO: 930 - DNA, 16 bp, Artificial Sequence
  Synthetic oligonucleotide
cgagaatggatattca

SEQ ID NO: 931 - DNA, 16 bp, Artificial Sequence
  Synthetic oligonucleotide
aacgagaatggatatt

SEQ ID NO: 932 - DNA, 16 bp, Artificial Sequence
  Synthetic oligonucleotide
gcaagatgacactaat

SEQ ID NO: 933 - DNA, 16 bp, Artificial Sequence
  Synthetic oligonucleotide
aggcaagatgacacta

SEQ ID NO: 934 - DNA, 16 bp, Artificial Sequence
  Synthetic oligonucleotide
gatatccacagcagca

SEQ ID NO: 935 - DNA, 16 bp, Artificial Sequence
  Synthetic oligonucleotide
gagatatccacagcag

SEQ ID NO: 936 - DNA, 16 bp, Artificial Sequence
  Synthetic oligonucleotide
tttctgatgtgactca

SEQ ID NO: 937 - DNA, 16 bp, Artificial Sequence
  Synthetic oligonucleotide
catttctgatgtgact

SEQ ID NO: 938 - DNA, 16 bp, Artificial Sequence
  Synthetic oligonucleotide
gcatttctgatgtgac

SEQ ID NO: 939 - DNA, 16 bp, Artificial Sequence
  Synthetic oligonucleotide
ggcatttctgatgtga

SEQ ID NO: 940 - DNA, 16 bp, Artificial Sequence
  Synthetic oligonucleotide
gtagggcatttctgat

SEQ ID NO: 941 - DNA, 16 bp, Artificial Sequence
  Synthetic oligonucleotide
tgtagggcatttctga

SEQ ID NO: 942 - DNA, 16 bp, Artificial Sequence
  Synthetic oligonucleotide
gatgtagggcatttct

SEQ ID NO: 943 - DNA, 16 bp, Artificial Sequence
  Synthetic oligonucleotide
tagtgattaggtcaaa

SEQ ID NO: 944 - DNA, 16 bp, Artificial Sequence
  Synthetic oligonucleotide
aattagtgattaggtc

SEQ ID NO: 945 - DNA, 16 bp, Artificial Sequence
  Synthetic oligonucleotide
tctattcataccaggt

SEQ ID NO: 946 - DNA, 16 bp, Artificial Sequence
  Synthetic oligonucleotide
tgtctattcataccag

SEQ ID NO: 947 - DNA, 16 bp, Artificial Sequence
  Synthetic oligonucleotide
ctgtctattcatacca

SEQ ID NO: 948 - DNA, 16 bp, Artificial Sequence
  Synthetic oligonucleotide
tctgtctattcatacc

SEQ ID NO: 949 - DNA, 16 bp, Artificial Sequence
  Synthetic oligonucleotide
ttctgtctattcatac

SEQ ID NO: 950 - DNA, 16 bp, Artificial Sequence
  Synthetic oligonucleotide
gtccagtgatactttc

SEQ ID NO: 951 - DNA, 16 bp, Artificial Sequence
  Synthetic oligonucleotide
gtccagtgatactttc

SEQ ID NO: 952 - DNA, 16 bp, Artificial Sequence
  Synthetic oligonucleotide
gtccagtgatactttc

SEQ ID NO: 953 - DNA, 16 bp, Artificial Sequence
  Synthetic oligonucleotide
gtccagtgatactttc

SEQ ID NO: 954 - DNA, 16 bp, Artificial Sequence
  Synthetic oligonucleotide
gtccagtgatactttc

SEQ ID NO: 955 - DNA, 16 bp, Artificial Sequence
  Synthetic oligonucleotide
gtccagtgatactttc

SEQ ID NO: 956 - DNA, 16 bp, Artificial Sequence
  Synthetic oligonucleotide
gtccagtgatactttc

SEQ ID NO: 957 - DNA, 16 bp, Artificial Sequence
  Synthetic oligonucleotide
gtccagtgatactttc

SEQ ID NO: 958 - DNA, 16 bp, Artificial Sequence
  Synthetic oligonucleotide
gtccagtgatactttc

SEQ ID NO: 959 - DNA, 16 bp, Artificial Sequence
  Synthetic oligonucleotide
tccagtgatactttca

SEQ ID NO: 960 - DNA, 16 bp, Artificial Sequence
  Synthetic oligonucleotide
tccagtgatactttca

SEQ ID NO: 961 - DNA, 16 bp, Artificial Sequence
  Synthetic oligonucleotide
tccagtgatactttca

SEQ ID NO: 962 - DNA, 16 bp, Artificial Sequence
  Synthetic oligonucleotide
tccagtgatactttca

SEQ ID NO: 963 - DNA, 16 bp, Artificial Sequence
  Synthetic oligonucleotide
tccagtgatactttca

SEQ ID NO: 964 - DNA, 16 bp, Artificial Sequence
  Synthetic oligonucleotide
tccagtgatactttca

SEQ ID NO: 965 - DNA, 16 bp, Artificial Sequence
  Synthetic oligonucleotide
ccagtgatactttcac

SEQ ID NO: 966 - DNA, 16 bp, Artificial Sequence
  Synthetic oligonucleotide
ccagtgatactttcac

SEQ ID NO: 967 - DNA, 16 bp, Artificial Sequence
  Synthetic oligonucleotide
ccagtgatactttcac

SEQ ID NO: 968 - DNA, 16 bp, Artificial Sequence
  Synthetic oligonucleotide
cttatgcagagaaaac

SEQ ID NO: 969 - DNA, 16 bp, Artificial Sequence
  Synthetic oligonucleotide
taattacttatgcaga

SEQ ID NO: 970 - DNA, 16 bp, Artificial Sequence
  Synthetic oligonucleotide
agtgtgactcagttaa

SEQ ID NO: 971 - DNA, 16 bp, Artificial Sequence
  Synthetic oligonucleotide
cagtgtgactcagtta

SEQ ID NO: 972 - DNA, 16 bp, Artificial Sequence
  Synthetic oligonucleotide
gcagtgtgactcagtt

SEQ ID NO: 973 - DNA, 16 bp, Artificial Sequence
  Synthetic oligonucleotide
ccagtattaacacaga

SEQ ID NO: 974 - DNA, 16 bp, Artificial Sequence
  Synthetic oligonucleotide
ttaattacttatgcag

SEQ ID NO: 975 - DNA, 16 bp, Artificial Sequence
  Synthetic oligonucleotide
accattcaaagttcac

SEQ ID NO: 976 - DNA, 16 bp, Artificial Sequence
  Synthetic oligonucleotide
ctttttgacaaatgga

SEQ ID NO: 977 - DNA, 16 bp, Artificial Sequence
  Synthetic oligonucleotide
attacttatgcagaga

SEQ ID NO: 978 - DNA, 16 bp, Artificial Sequence
  Synthetic oligonucleotide
aaagttcacataaagg

SEQ ID NO: 979 - DNA, 16 bp, Artificial Sequence
  Synthetic oligonucleotide
ccattcaaagttcaca

SEQ ID NO: 980 - DNA, 16 bp, Artificial Sequence
  Synthetic oligonucleotide
aaccattcaaagttca

SEQ ID NO: 981 - DNA, 16 bp, Artificial Sequence
  Synthetic oligonucleotide
actttttgacaaatgg

SEQ ID NO: 982 - DNA, 16 bp, Artificial Sequence
  Synthetic oligonucleotide
tcattactttttgaca

SEQ ID NO: 983 - DNA, 16 bp, Artificial Sequence
  Synthetic oligonucleotide
gtattaacacagaagt

SEQ ID NO: 984 - DNA, 16 bp, Artificial Sequence
  Synthetic oligonucleotide
atccagtattaacaca

SEQ ID NO: 985 - DNA, 16 bp, Artificial Sequence
  Synthetic oligonucleotide
ctgaattagtctccat

SEQ ID NO: 986 - DNA, 16 bp, Artificial Sequence
  Synthetic oligonucleotide
acttatgcagagaaaa

SEQ ID NO: 987 - DNA, 16 bp, Artificial Sequence
  Synthetic oligonucleotide
tacttatgcagagaaa

SEQ ID NO: 988 - DNA, 16 bp, Artificial Sequence
  Synthetic oligonucleotide
ttacttatgcagagaa

SEQ ID NO: 989 - DNA, 16 bp, Artificial Sequence
  Synthetic oligonucleotide
aattacttatgcagag

SEQ ID NO: 990 - DNA, 16 bp, Artificial Sequence
  Synthetic oligonucleotide
caaagttcacataaag

SEQ ID NO: 991 - DNA, 16 bp, Artificial Sequence
  Synthetic oligonucleotide
tcaaagttcacataaa

SEQ ID NO: 992 - DNA, 16 bp, Artificial Sequence
  Synthetic oligonucleotide
ttcaaagttcacataa

SEQ ID NO: 993 - DNA, 16 bp, Artificial Sequence
  Synthetic oligonucleotide
attcaaagttcacata

SEQ ID NO: 994 - DNA, 16 bp, Artificial Sequence
  Synthetic oligonucleotide
cattcaaagttcacat

SEQ ID NO: 995 - DNA, 16 bp, Artificial Sequence
  Synthetic oligonucleotide
tactttttgacaaatg

SEQ ID NO: 996 - DNA, 16 bp, Artificial Sequence
  Synthetic oligonucleotide
ttactttttgacaaat

SEQ ID NO: 997 - DNA, 16 bp, Artificial Sequence
  Synthetic oligonucleotide
attactttttgacaaa

SEQ ID NO: 998 - DNA, 16 bp, Artificial Sequence
  Synthetic oligonucleotide
cattactttttgacaa

SEQ ID NO: 999 - DNA, 16 bp, Artificial Sequence
  Synthetic oligonucleotide
agtattaacacagaag

SEQ ID NO: 1000 - DNA, 16 bp, Artificial Sequence
  Synthetic oligonucleotide
cagtattaacacagaa

SEQ ID NO: 1001 - DNA, 16 bp, Artificial Sequence
  Synthetic oligonucleotide
tccagtattaacacag

SEQ ID NO: 1002 - DNA, 16 bp, Artificial Sequence
  Synthetic oligonucleotide
tctccattagtaaata

SEQ ID NO: 1003 - DNA, 16 bp, Artificial Sequence
  Synthetic oligonucleotide
attagtctccattagt

SEQ ID NO: 1004 - DNA, 16 bp, Artificial Sequence
  Synthetic oligonucleotide
tgaattagtctccatt

SEQ ID NO: 1005 - DNA, 16 bp, Artificial Sequence
  Synthetic oligonucleotide
tctgaattagtctcca

SEQ ID NO: 1006 - DNA, 16 bp, Artificial Sequence
  Synthetic oligonucleotide
aaatctgaattagtct

SEQ ID NO: 1007 - DNA, 16 bp, Artificial Sequence
  Synthetic oligonucleotide
cttacaaatctgaatt

SEQ ID NO: 1008 - DNA, 16 bp, Artificial Sequence
  Synthetic oligonucleotide
accattcaaagttcac

SEQ ID NO: 1009 - DNA, 16 bp, Artificial Sequence
  Synthetic oligonucleotide
cagtgtgactcagtta

SEQ ID NO: 1010 - DNA, 16 bp, Artificial Sequence
  Synthetic oligonucleotide
accattcaaagttcac

SEQ ID NO: 1011 - DNA, 16 bp, Artificial Sequence
  Synthetic oligonucleotide
cagtgtgactcagtta

SEQ ID NO: 1012 - DNA, 16 bp, Artificial Sequence
  Synthetic oligonucleotide
accattcaaagttcac

SEQ ID NO: 1013 - DNA, 16 bp, Artificial Sequence
  Synthetic oligonucleotide
cagtgtgactcagtta

SEQ ID NO: 1014 - DNA, 16 bp, Artificial Sequence
  Synthetic oligonucleotide
accattcaaagttcac

SEQ ID NO: 1015 - DNA, 16 bp, Artificial Sequence
  Synthetic oligonucleotide
cagtgtgactcagtta

SEQ ID NO: 1016 - DNA, 16 bp, Artificial Sequence
  Synthetic oligonucleotide
accattcaaagttcac

SEQ ID NO: 1017 - DNA, 16 bp, Artificial Sequence
  Synthetic oligonucleotide
cagtgtgactcagtta

SEQ ID NO: 1018 - DNA, 16 bp, Artificial Sequence
  Synthetic oligonucleotide
accattcaaagttcac

SEQ ID NO: 1019 - DNA, 16 bp, Artificial Sequence
  Synthetic oligonucleotide
cagtgtgactcagtta

SEQ ID NO: 1020 - DNA, 16 bp, Artificial Sequence
  Synthetic oligonucleotide
accattcaaagttcac

SEQ ID NO: 1021 - DNA, 16 bp, Artificial Sequence
  Synthetic oligonucleotide
cagtgtgactcagtta

SEQ ID NO: 1022 - DNA, 16 bp, Artificial Sequence
  Synthetic oligonucleotide
accattcaaagttcac

SEQ ID NO: 1023 - DNA, 16 bp, Artificial Sequence
  Synthetic oligonucleotide
cagtgtgactcagtta

SEQ ID NO: 1024 - DNA, 16 bp, Artificial Sequence
  Synthetic oligonucleotide
accattcaaagttcac

SEQ ID NO: 1025 - DNA, 16 bp, Artificial Sequence
  Synthetic oligonucleotide
cagtgtgactcagtta

SEQ ID NO: 1026 - DNA, 16 bp, Artificial Sequence
  Synthetic oligonucleotide
ccattcaaagttcaca

SEQ ID NO: 1027 - DNA, 16 bp, Artificial Sequence
  Synthetic oligonucleotide
agtgtgactcagttaa

SEQ ID NO: 1028 - DNA, 16 bp, Artificial Sequence
  Synthetic oligonucleotide
ccattcaaagttcaca

SEQ ID NO: 1029 - DNA, 16 bp, Artificial Sequence
  Synthetic oligonucleotide
agtgtgactcagttaa

SEQ ID NO: 1030 - DNA, 16 bp, Artificial Sequence
  Synthetic oligonucleotide
ccattcaaagttcaca

SEQ ID NO: 1031 - DNA, 16 bp, Artificial Sequence
  Synthetic oligonucleotide
agtgtgactcagttaa

SEQ ID NO: 1032 - DNA, 16 bp, Artificial Sequence
  Synthetic oligonucleotide
ccattcaaagttcaca

SEQ ID NO: 1033 - DNA, 16 bp, Artificial Sequence
  Synthetic oligonucleotide
agtgtgactcagttaa

SEQ ID NO: 1034 - DNA, 16 bp, Artificial Sequence
  Synthetic oligonucleotide
ccattcaaagttcaca

SEQ ID NO: 1035 - DNA, 16 bp, Artificial Sequence
  Synthetic oligonucleotide
agtgtgactcagttaa

SEQ ID NO: 1036 - DNA, 16 bp, Artificial Sequence
  Synthetic oligonucleotide
ccattcaaagttcaca

SEQ ID NO: 1037 - DNA, 16 bp, Artificial Sequence
  Synthetic oligonucleotide
agtgtgactcagttaa

SEQ ID NO: 1038 - DNA, 16 bp, Artificial Sequence
  Synthetic oligonucleotide
cattcaaagttcacat

SEQ ID NO: 1039 - DNA, 16 bp, Artificial Sequence
  Synthetic oligonucleotide
gtgtgactcagttaaa

SEQ ID NO: 1040 - DNA, 16 bp, Artificial Sequence
  Synthetic oligonucleotide
cattcaaagttcacat

SEQ ID NO: 1041 - DNA, 16 bp, Artificial Sequence
  Synthetic oligonucleotide
gtgtgactcagttaaa

SEQ ID NO: 1042 - DNA, 16 bp, Artificial Sequence
  Synthetic oligonucleotide
cattcaaagttcacat

SEQ ID NO: 1043 - DNA, 16 bp, Artificial Sequence
  Synthetic oligonucleotide
gtgtgactcagttaaa

SEQ ID NO: 1044 - DNA, 16 bp, Artificial Sequence
  Synthetic oligonucleotide
taaaacgagaatggat

SEQ ID NO: 1045 - DNA, 16 bp, Artificial Sequence
  Synthetic oligonucleotide
tcatggagatatccac

SEQ ID NO: 1046 - DNA, 16 bp, Artificial Sequence
  Synthetic oligonucleotide
gccctgaggaaataag

SEQ ID NO: 1047 - DNA, 16 bp, Artificial Sequence
  Synthetic oligonucleotide
gtcaaatccctttatg

SEQ ID NO: 1048 - DNA, 16 bp, Artificial Sequence
  Synthetic oligonucleotide
taatggattgggcagc

SEQ ID NO: 1049 - DNA, 16 bp, Artificial Sequence
  Synthetic oligonucleotide
ctactgtcgctaatgg

SEQ ID NO: 1050 - DNA, 16 bp, Artificial Sequence
  Synthetic oligonucleotide
gtaacataggttaaaa

SEQ ID NO: 1051 - DNA, 16 bp, Artificial Sequence
  Synthetic oligonucleotide
tgaagatggtgtaaca

SEQ ID NO: 1052 - DNA, 16 bp, Artificial Sequence
  Synthetic oligonucleotide
actgaagatggtgtaa

SEQ ID NO: 1053 - DNA, 16 bp, Artificial Sequence
  Synthetic oligonucleotide
tggcactgaagatggt

SEQ ID NO: 1054 - DNA, 16 bp, Artificial Sequence
  Synthetic oligonucleotide
actggcactgaagatg

SEQ ID NO: 1055 - DNA, 16 bp, Artificial Sequence
  Synthetic oligonucleotide
caagactggcactgaa

SEQ ID NO: 1056 - DNA, 16 bp, Artificial Sequence
  Synthetic oligonucleotide
cccaagactggcactg

SEQ ID NO: 1057 - DNA, 16 bp, Artificial Sequence
  Synthetic oligonucleotide
attttgcccaagactg

SEQ ID NO: 1058 - DNA, 16 bp, Artificial Sequence
  Synthetic oligonucleotide
cacaattttgcccaag

SEQ ID NO: 1059 - DNA, 16 bp, Artificial Sequence
  Synthetic oligonucleotide
cctcttgcacaatttt

SEQ ID NO: 1060 - DNA, 16 bp, Artificial Sequence
  Synthetic oligonucleotide
cttcacctcttgcaca

SEQ ID NO: 1061 - DNA, 16 bp, Artificial Sequence
  Synthetic oligonucleotide
tataaacttcacctct

SEQ ID NO: 1062 - DNA, 16 bp, Artificial Sequence
  Synthetic oligonucleotide
cctaaaacgagaatgg

SEQ ID NO: 1063 - DNA, 16 bp, Artificial Sequence
  Synthetic oligonucleotide
gtcctaaaacgagaat

SEQ ID NO: 1064 - DNA, 16 bp, Artificial Sequence
  Synthetic oligonucleotide
gagtcctaaaacgaga

SEQ ID NO: 1065 - DNA, 16 bp, Artificial Sequence
  Synthetic oligonucleotide
gaagaagagtcctaaa

SEQ ID NO: 1066 - DNA, 16 bp, Artificial Sequence
  Synthetic oligonucleotide
tatggaagaagagtcc

SEQ ID NO: 1067 - DNA, 16 bp, Artificial Sequence
  Synthetic oligonucleotide
ctaatatggaagaaga

SEQ ID NO: 1068 - DNA, 16 bp, Artificial Sequence
  Synthetic oligonucleotide
tgacactaatatggaa

SEQ ID NO: 1069 - DNA, 16 bp, Artificial Sequence
  Synthetic oligonucleotide
gggcatgtggaaggta

SEQ ID NO: 1070 - DNA, 16 bp, Artificial Sequence
  Synthetic oligonucleotide
gtattaaaactgcatc

SEQ ID NO: 1071 - DNA, 16 bp, Artificial Sequence
  Synthetic oligonucleotide
taaatcttatggttag

SEQ ID NO: 1072 - DNA, 16 bp, Artificial Sequence
  Synthetic oligonucleotide
gtaaatcttatggtta

SEQ ID NO: 1073 - DNA, 16 bp, Artificial Sequence
  Synthetic oligonucleotide
agtaaatcttatggtt

SEQ ID NO: 1074 - DNA, 16 bp, Artificial Sequence
  Synthetic oligonucleotide
cagtaaatcttatggt

SEQ ID NO: 1075 - DNA, 16 bp, Artificial Sequence
  Synthetic oligonucleotide
gcagtaaatcttatgg

SEQ ID NO: 1076 - DNA, 16 bp, Artificial Sequence
  Synthetic oligonucleotide
agcagtaaatcttatg

SEQ ID NO: 1077 - DNA, 16 bp, Artificial Sequence
  Synthetic oligonucleotide
cagcagtaaatcttat

SEQ ID NO: 1078 - DNA, 16 bp, Artificial Sequence
  Synthetic oligonucleotide
cagcagcagtaaatct

SEQ ID NO: 1079 - DNA, 16 bp, Artificial Sequence
  Synthetic oligonucleotide
cacagcagcagtaaat

SEQ ID NO: 1080 - DNA, 16 bp, Artificial Sequence
  Synthetic oligonucleotide
tccacagcagcagtaa

SEQ ID NO: 1081 - DNA, 16 bp, Artificial Sequence
  Synthetic oligonucleotide
atggagatatccacag

SEQ ID NO: 1082 - DNA, 16 bp, Artificial Sequence
  Synthetic oligonucleotide
aacttcatggagatat

SEQ ID NO: 1083 - DNA, 16 bp, Artificial Sequence
  Synthetic oligonucleotide
ggaaaacttcatggag

SEQ ID NO: 1084 - DNA, 16 bp, Artificial Sequence
  Synthetic oligonucleotide
gtgggaaaacttcatg

SEQ ID NO: 1085 - DNA, 16 bp, Artificial Sequence
  Synthetic oligonucleotide
taagatgtagggcatt

SEQ ID NO: 1086 - DNA, 16 bp, Artificial Sequence
  Synthetic oligonucleotide
aataagatgtagggca

SEQ ID NO: 1087 - DNA, 16 bp, Artificial Sequence
  Synthetic oligonucleotide
gaaataagatgtaggg

SEQ ID NO: 1088 - DNA, 16 bp, Artificial Sequence
  Synthetic oligonucleotide
gagccctgaggaaata

SEQ ID NO: 1089 - DNA, 16 bp, Artificial Sequence
  Synthetic oligonucleotide
cttgagccctgaggaa

SEQ ID NO: 1090 - DNA, 16 bp, Artificial Sequence
  Synthetic oligonucleotide
tcagattctcttgagc

SEQ ID NO: 1091 - DNA, 16 bp, Artificial Sequence
  Synthetic oligonucleotide
gtcagattctcttgag

SEQ ID NO: 1092 - DNA, 16 bp, Artificial Sequence
  Synthetic oligonucleotide
tgtcagattctcttga

SEQ ID NO: 1093 - DNA, 16 bp, Artificial Sequence
  Synthetic oligonucleotide
atctgtcagattctct

SEQ ID NO: 1094 - DNA, 16 bp, Artificial Sequence
  Synthetic oligonucleotide
atccctttatggtatc

SEQ ID NO: 1095 - DNA, 16 bp, Artificial Sequence
  Synthetic oligonucleotide
caaatccctttatggt

SEQ ID NO: 1096 - DNA, 16 bp, Artificial Sequence
  Synthetic oligonucleotide
gaaaattagtgattag

SEQ ID NO: 1097 - DNA, 16 bp, Artificial Sequence
  Synthetic oligonucleotide
acctgaaaattagtga

SEQ ID NO: 1098 - DNA, 16 bp, Artificial Sequence
  Synthetic oligonucleotide
agccaccacctgaaaa

SEQ ID NO: 1099 - DNA, 16 bp, Artificial Sequence
  Synthetic oligonucleotide
tcaaagcatcagccac

SEQ ID NO: 1100 - DNA, 16 bp, Artificial Sequence
  Synthetic oligonucleotide
cagcaaagagatgttc

SEQ ID NO: 1101 - DNA, 16 bp, Artificial Sequence
  Synthetic oligonucleotide
gattgggcagcaaaga

SEQ ID NO: 1102 - DNA, 16 bp, Artificial Sequence
  Synthetic oligonucleotide
atggattgggcagcaa

SEQ ID NO: 1103 - DNA, 16 bp, Artificial Sequence
  Synthetic oligonucleotide
tcctactgtcgctaat

SEQ ID NO: 1104 - DNA, 16 bp, Artificial Sequence
  Synthetic oligonucleotide
aatcctactgtcgcta

SEQ ID NO: 1105 - DNA, 16 bp, Artificial Sequence
  Synthetic oligonucleotide
ccagagtcaagtcttc

SEQ ID NO: 1106 - DNA, 16 bp, Artificial Sequence
  Synthetic oligonucleotide
attagagtttgtgtat

SEQ ID NO: 1107 - DNA, 16 bp, Artificial Sequence
  Synthetic oligonucleotide
ttataacaaggtctca

SEQ ID NO: 1108 - DNA, 16 bp, Artificial Sequence
  Synthetic oligonucleotide
cggtaaatattaataa

SEQ ID NO: 1109 - DNA, 16 bp, Artificial Sequence
  Synthetic oligonucleotide
tttccaatacggtaaa

SEQ ID NO: 1110 - DNA, 16 bp, Artificial Sequence
  Synthetic oligonucleotide
aatttccaatacggta

SEQ ID NO: 1111 - DNA, 16 bp, Artificial Sequence
  Synthetic oligonucleotide
taatagattgaatgca

SEQ ID NO: 1112 - DNA, 16 bp, Artificial Sequence
  Synthetic oligonucleotide
actaagacttttctgg

SEQ ID NO: 1113 - DNA, 16 bp, Artificial Sequence
  Synthetic oligonucleotide
aagttaacaaccacta

SEQ ID NO: 1114 - DNA, 16 bp, Artificial Sequence
  Synthetic oligonucleotide
aattgtatcacacacg

SEQ ID NO: 1115 - DNA, 16 bp, Artificial Sequence
  Synthetic oligonucleotide
aggctagaaaaattgt

SEQ ID NO: 1116 - DNA, 16 bp, Artificial Sequence
  Synthetic oligonucleotide
attgtagataaacact

SEQ ID NO: 1117 - DNA, 16 bp, Artificial Sequence
  Synthetic oligonucleotide
attataggatgagtag

SEQ ID NO: 1118 - DNA, 16 bp, Artificial Sequence
  Synthetic oligonucleotide
gagtaaatgcacaact

SEQ ID NO: 1119 - DNA, 16 bp, Artificial Sequence
  Synthetic oligonucleotide
gattgtataacaaaca

SEQ ID NO: 1120 - DNA, 16 bp, Artificial Sequence
  Synthetic oligonucleotide
agtgaatatatctcag

SEQ ID NO: 1121 - DNA, 16 bp, Artificial Sequence
  Synthetic oligonucleotide
aagatgcaagtgaata

SEQ ID NO: 1122 - DNA, 16 bp, Artificial Sequence
  Synthetic oligonucleotide
agagaactccgaatta

SEQ ID NO: 1123 - DNA, 16 bp, Artificial Sequence
  Synthetic oligonucleotide
atcagatgagagttga

SEQ ID NO: 1124 - DNA, 16 bp, Artificial Sequence
  Synthetic oligonucleotide
actcatgtagagactt

SEQ ID NO: 1125 - DNA, 16 bp, Artificial Sequence
  Synthetic oligonucleotide
tatcatgacttcactc

SEQ ID NO: 1126 - DNA, 16 bp, Artificial Sequence
  Synthetic oligonucleotide
taaatagccagactgc

SEQ ID NO: 1127 - DNA, 16 bp, Artificial Sequence
  Synthetic oligonucleotide
tacatagacagttctt

SEQ ID NO: 1128 - DNA, 16 bp, Artificial Sequence
  Synthetic oligonucleotide
cataaatgctacatag

SEQ ID NO: 1129 - DNA, 16 bp, Artificial Sequence
  Synthetic oligonucleotide
atgaactgtacttcat

SEQ ID NO: 1130 - DNA, 16 bp, Artificial Sequence
  Synthetic oligonucleotide
actatcaaatactcca

SEQ ID NO: 1131 - DNA, 16 bp, Artificial Sequence
  Synthetic oligonucleotide
atattagaacatgtca

SEQ ID NO: 1132 - DNA, 16 bp, Artificial Sequence
  Synthetic oligonucleotide
attttcagcaggcctt

SEQ ID NO: 1133 - DNA, 16 bp, Artificial Sequence
  Synthetic oligonucleotide
aacaagatttacctct

SEQ ID NO: 1134 - DNA, 16 bp, Artificial Sequence
  Synthetic oligonucleotide
caaggtacatttcaga

SEQ ID NO: 1135 - DNA, 16 bp, Artificial Sequence
  Synthetic oligonucleotide
cagataggatacaaat

SEQ ID NO: 1136 - DNA, 16 bp, Artificial Sequence
  Synthetic oligonucleotide
caataaaaagattgtc

SEQ ID NO: 1137 - DNA, 16 bp, Artificial Sequence
  Synthetic oligonucleotide
acctttacatatgatg

SEQ ID NO: 1138 - DNA, 16 bp, Artificial Sequence
  Synthetic oligonucleotide
tttcactagtacaatt

SEQ ID NO: 1139 - DNA, 16 bp, Artificial Sequence
  Synthetic oligonucleotide
aatagtacctttatat

SEQ ID NO: 1140 - DNA, 16 bp, Artificial Sequence
  Synthetic oligonucleotide
catctgcttgggatgg

SEQ ID NO: 1141 - DNA, 16 bp, Artificial Sequence
  Synthetic oligonucleotide
cctcatctgcttggga

SEQ ID NO: 1142 - DNA, 16 bp, Artificial Sequence
  Synthetic oligonucleotide
cctaagaaacaatcta

SEQ ID NO: 1143 - DNA, 16 bp, Artificial Sequence
  Synthetic oligonucleotide
actttgacctgttcta

SEQ ID NO: 1144 - DNA, 16 bp, Artificial Sequence
  Synthetic oligonucleotide
tcttcaagacactaca

SEQ ID NO: 1145 - DNA, 16 bp, Artificial Sequence
  Synthetic oligonucleotide
cgcaaagtgtctcttc

SEQ ID NO: 1146 - DNA, 16 bp, Artificial Sequence
  Synthetic oligonucleotide
cagaacttgcctcagc

SEQ ID NO: 1147 - DNA, 16 bp, Artificial Sequence
  Synthetic oligonucleotide
gattagttatctaatc

SEQ ID NO: 1148 - DNA, 16 bp, Artificial Sequence
  Synthetic oligonucleotide
cttaaaattggaagcc

SEQ ID NO: 1149 - DNA, 16 bp, Artificial Sequence
  Synthetic oligonucleotide
atacagagactattgc

SEQ ID NO: 1150 - DNA, 16 bp, Artificial Sequence
  Synthetic oligonucleotide
tacacattgaattaac

SEQ ID NO: 1151 - DNA, 16 bp, Artificial Sequence
  Synthetic oligonucleotide
attaaaatgggtgcac

SEQ ID NO: 1152 - DNA, 16 bp, Artificial Sequence
  Synthetic oligonucleotide
ctgattggaaacaaag

SEQ ID NO: 1153 - DNA, 16 bp, Artificial Sequence
  Synthetic oligonucleotide
agagtcaagtcttctg

SEQ ID NO: 1154 - DNA, 16 bp, Artificial Sequence
  Synthetic oligonucleotide
accaatgcttcccaga

SEQ ID NO: 1155 - DNA, 16 bp, Artificial Sequence
  Synthetic oligonucleotide
agataatctcagatac

SEQ ID NO: 1156 - DNA, 16 bp, Artificial Sequence
  Synthetic oligonucleotide
caactatttaactact

SEQ ID NO: 1157 - DNA, 16 bp, Artificial Sequence
  Synthetic oligonucleotide
caatggcagtgaaatc

SEQ ID NO: 1158 - DNA, 16 bp, Artificial Sequence
  Synthetic oligonucleotide
atcaaaacctgcaatg

SEQ ID NO: 1159 - DNA, 16 bp, Artificial Sequence
  Synthetic oligonucleotide
agtcatatcctttcta

SEQ ID NO: 1160 - DNA, 16 bp, Artificial Sequence
  Synthetic oligonucleotide
ttccaaaatgtgcagt

SEQ ID NO: 1161 - DNA, 16 bp, Artificial Sequence
  Synthetic oligonucleotide
aacaatagccaccctc

SEQ ID NO: 1162 - DNA, 16 bp, Artificial Sequence
  Synthetic oligonucleotide
caagagtacagtgcaa

SEQ ID NO: 1163 - DNA, 16 bp, Artificial Sequence
  Synthetic oligonucleotide
tttgaaagatagctaa

SEQ ID NO: 1164 - DNA, 16 bp, Artificial Sequence
  Synthetic oligonucleotide
gatctctgaactataa

SEQ ID NO: 1165 - DNA, 16 bp, Artificial Sequence
  Synthetic oligonucleotide
ccacaataaaagcatg

SEQ ID NO: 1166 - DNA, 16 bp, Artificial Sequence
  Synthetic oligonucleotide
cataatacttgaactg

SEQ ID NO: 1167 - DNA, 16 bp, Artificial Sequence
  Synthetic oligonucleotide
tgaataggaaactgtt

SEQ ID NO: 1168 - DNA, 16 bp, Artificial Sequence
  Synthetic oligonucleotide
accaatccaatgatta

SEQ ID NO: 1169 - DNA, 16 bp, Artificial Sequence
  Synthetic oligonucleotide
acactaaagatgaaac

SEQ ID NO: 1170 - DNA, 16 bp, Artificial Sequence
  Synthetic oligonucleotide
ggtaaataaatactct

SEQ ID NO: 1171 - DNA, 16 bp, Artificial Sequence
  Synthetic oligonucleotide
ttacataaggcttttc

SEQ ID NO: 1172 - DNA, 16 bp, Artificial Sequence
  Synthetic oligonucleotide
caaccatccctcattg

SEQ ID NO: 1173 - DNA, 16 bp, Artificial Sequence
  Synthetic oligonucleotide
acccaaccatccctca

SEQ ID NO: 1174 - DNA, 16 bp, Artificial Sequence
  Synthetic oligonucleotide
atacgaaatcaatcat

SEQ ID NO: 1175 - DNA, 16 bp, Artificial Sequence
  Synthetic oligonucleotide
aatttgccacttctga

SEQ ID NO: 1176 - DNA, 16 bp, Artificial Sequence
  Synthetic oligonucleotide
caaaatgtgcactttc

SEQ ID NO: 1177 - DNA, 16 bp, Artificial Sequence
  Synthetic oligonucleotide
ttcttaatttgaccta

SEQ ID NO: 1178 - DNA, 16 bp, Artificial Sequence
  Synthetic oligonucleotide
gaccagtaaagtttta

SEQ ID NO: 1179 - DNA, 16 bp, Artificial Sequence
  Synthetic oligonucleotide
ctaggattaaggaatt

SEQ ID NO: 1180 - DNA, 16 bp, Artificial Sequence
  Synthetic oligonucleotide
aatctggtctgttttg

SEQ ID NO: 1181 - DNA, 16 bp, Artificial Sequence
  Synthetic oligonucleotide
gattcaaccaattatg

SEQ ID NO: 1182 - DNA, 16 bp, Artificial Sequence
  Synthetic oligonucleotide
taattagcatgattgc

SEQ ID NO: 1183 - DNA, 16 bp, Artificial Sequence
  Synthetic oligonucleotide
tattaagatcccaata

SEQ ID NO: 1184 - DNA, 16 bp, Artificial Sequence
  Synthetic oligonucleotide
tagtacagcgaatagc

SEQ ID NO: 1185 - DNA, 16 bp, Artificial Sequence
  Synthetic oligonucleotide
aagcagtgacactgct

SEQ ID NO: 1186 - DNA, 16 bp, Artificial Sequence
  Synthetic oligonucleotide
ctcaagggtgaaaaat

SEQ ID NO: 1187 - DNA, 16 bp, Artificial Sequence
  Synthetic oligonucleotide
atttttatgcagccag

SEQ ID NO: 1188 - DNA, 16 bp, Artificial Sequence
  Synthetic oligonucleotide
taagatagcttcctgt

SEQ ID NO: 1189 - DNA, 16 bp, Artificial Sequence
  Synthetic oligonucleotide
ctaattcatatataag

SEQ ID NO: 1190 - DNA, 16 bp, Artificial Sequence
  Synthetic oligonucleotide
agtaagtgtcttttta

SEQ ID NO: 1191 - DNA, 16 bp, Artificial Sequence
  Synthetic oligonucleotide
ccataaagtctgaggg

SEQ ID NO: 1192 - DNA, 16 bp, Artificial Sequence
  Synthetic oligonucleotide
gtcaaaggacatgtag

SEQ ID NO: 1193 - DNA, 16 bp, Artificial Sequence
  Synthetic oligonucleotide
agtatatctaaatcta

SEQ ID NO: 1194 - DNA, 16 bp, Artificial Sequence
  Synthetic oligonucleotide
actcaacacaaggtgc

SEQ ID NO: 1195 - DNA, 16 bp, Artificial Sequence
  Synthetic oligonucleotide
tacctctcatattatt

SEQ ID NO: 1196 - DNA, 16 bp, Artificial Sequence
  Synthetic oligonucleotide
ccacaagtgatcactt

SEQ ID NO: 1197 - DNA, 16 bp, Artificial Sequence
  Synthetic oligonucleotide
gacattcactaaaagt

SEQ ID NO: 1198 - DNA, 16 bp, Artificial Sequence
  Synthetic oligonucleotide
tttatatactacacgc

SEQ ID NO: 1199 - DNA, 16 bp, Artificial Sequence
  Synthetic oligonucleotide
taaaactgcatacagg

SEQ ID NO: 1200 - DNA, 16 bp, Artificial Sequence
  Synthetic oligonucleotide
tagacttgggagtctt

SEQ ID NO: 1201 - DNA, 16 bp, Artificial Sequence
  Synthetic oligonucleotide
tacatacatgtctggt

SEQ ID NO: 1202 - DNA, 16 bp, Artificial Sequence
  Synthetic oligonucleotide
aattagcagtttttag

SEQ ID NO: 1203 - DNA, 16 bp, Artificial Sequence
  Synthetic oligonucleotide
gcaaaaacatagacga

SEQ ID NO: 1204 - DNA, 16 bp, Artificial Sequence
  Synthetic oligonucleotide
caaagacagagctacc

SEQ ID NO: 1205 - DNA, 16 bp, Artificial Sequence
  Synthetic oligonucleotide
taccaaaaccacttgg

SEQ ID NO: 1206 - DNA, 16 bp, Artificial Sequence
  Synthetic oligonucleotide
gttaaaaatgggtgga

SEQ ID NO: 1207 - DNA, 16 bp, Artificial Sequence
  Synthetic oligonucleotide
cagcattccctgaatc

SEQ ID NO: 1208 - DNA, 16 bp, Artificial Sequence
  Synthetic oligonucleotide
tctgataaaccccaaa

SEQ ID NO: 1209 - DNA, 16 bp, Artificial Sequence
  Synthetic oligonucleotide
caaaatgttttggccc

SEQ ID NO: 1210 - DNA, 16 bp, Artificial Sequence
  Synthetic oligonucleotide
gggagatcagattcat

SEQ ID NO: 1211 - DNA, 16 bp, Artificial Sequence
  Synthetic oligonucleotide
aataggaagggagatc

SEQ ID NO: 1212 - DNA, 16 bp, Artificial Sequence
  Synthetic oligonucleotide
gtatattaagtaagga

SEQ ID NO: 1213 - DNA, 16 bp, Artificial Sequence
  Synthetic oligonucleotide
gtgaaactggacaatc

SEQ ID NO: 1214 - DNA, 16 bp, Artificial Sequence
  Synthetic oligonucleotide
atttttccaaggaccg

SEQ ID NO: 1215 - DNA, 16 bp, Artificial Sequence
  Synthetic oligonucleotide
catgttgaggacacag

SEQ ID NO: 1216 - DNA, 16 bp, Artificial Sequence
  Synthetic oligonucleotide
gtggaagagacatgaa

SEQ ID NO: 1217 - DNA, 16 bp, Artificial Sequence
  Synthetic oligonucleotide
aatctaggtgtcacat

SEQ ID NO: 1218 - DNA, 16 bp, Artificial Sequence
  Synthetic oligonucleotide
cactttccgtttataa

SEQ ID NO: 1219 - DNA, 16 bp, Artificial Sequence
  Synthetic oligonucleotide
cgaaaggttatttaaa

SEQ ID NO: 1220 - DNA, 16 bp, Artificial Sequence
  Synthetic oligonucleotide
cacctgtaggaaaaga

SEQ ID NO: 1221 - DNA, 16 bp, Artificial Sequence
  Synthetic oligonucleotide
ctgcttaataacacct

SEQ ID NO: 1222 - DNA, 16 bp, Artificial Sequence
  Synthetic oligonucleotide
actgtcataagcatat

SEQ ID NO: 1223 - DNA, 16 bp, Artificial Sequence
  Synthetic oligonucleotide
atactgtcataagcat

SEQ ID NO: 1224 - DNA, 16 bp, Artificial Sequence
  Synthetic oligonucleotide
agcccttacttatatg

SEQ ID NO: 1225 - DNA, 16 bp, Artificial Sequence
  Synthetic oligonucleotide
tacattccaagtatag

SEQ ID NO: 1226 - DNA, 16 bp, Artificial Sequence
  Synthetic oligonucleotide
accagaacatcaagtt

SEQ ID NO: 1227 - DNA, 16 bp, Artificial Sequence
  Synthetic oligonucleotide
cattaaccagaacatc

SEQ ID NO: 1228 - DNA, 16 bp, Artificial Sequence
  Synthetic oligonucleotide
tcaagataagataacc

SEQ ID NO: 1229 - DNA, 16 bp, Artificial Sequence
  Synthetic oligonucleotide
cttcttttacactgac

SEQ ID NO: 1230 - DNA, 16 bp, Artificial Sequence
  Synthetic oligonucleotide
tactactattctataa

SEQ ID NO: 1231 - DNA, 16 bp, Artificial Sequence
  Synthetic oligonucleotide
taagactagggaaaag

SEQ ID NO: 1232 - DNA, 16 bp, Artificial Sequence
  Synthetic oligonucleotide
ctacctaacagtcttg

SEQ ID NO: 1233 - DNA, 16 bp, Artificial Sequence
  Synthetic oligonucleotide
actcaccactacacac

SEQ ID NO: 1234 - DNA, 16 bp, Artificial Sequence
  Synthetic oligonucleotide
atgaacgaaggtaggt

SEQ ID NO: 1235 - DNA, 16 bp, Artificial Sequence
  Synthetic oligonucleotide
cacaatatagtctcca

SEQ ID NO: 1236 - DNA, 16 bp, Artificial Sequence
  Synthetic oligonucleotide
ggcaatctgcagcaat

SEQ ID NO: 1237 - DNA, 16 bp, Artificial Sequence
  Synthetic oligonucleotide
ctacatccaaccacct

SEQ ID NO: 1238 - DNA, 16 bp, Artificial Sequence
  Synthetic oligonucleotide
ttaacatggcatccta

SEQ ID NO: 1239 - DNA, 16 bp, Artificial Sequence
  Synthetic oligonucleotide
agagattcttaacatg

SEQ ID NO: 1240 - DNA, 16 bp, Artificial Sequence
  Synthetic oligonucleotide
taacttaaactaactc

SEQ ID NO: 1241 - DNA, 16 bp, Artificial Sequence
  Synthetic oligonucleotide
aatttgtagccttagg

SEQ ID NO: 1242 - DNA, 16 bp, Artificial Sequence
  Synthetic oligonucleotide
tactaatttgtagcct

SEQ ID NO: 1243 - DNA, 16 bp, Artificial Sequence
  Synthetic oligonucleotide
ctaaataaggtttcag

SEQ ID NO: 1244 - DNA, 16 bp, Artificial Sequence
  Synthetic oligonucleotide
tatacacacggcattg

SEQ ID NO: 1245 - DNA, 16 bp, Artificial Sequence
  Synthetic oligonucleotide
cttagaagtgcaatta

SEQ ID NO: 1246 - DNA, 16 bp, Artificial Sequence
  Synthetic oligonucleotide
gtttcaaagtaatcta

SEQ ID NO: 1247 - DNA, 16 bp, Artificial Sequence
  Synthetic oligonucleotide
tatcgatagcaaagtt

SEQ ID NO: 1248 - DNA, 16 bp, Artificial Sequence
  Synthetic oligonucleotide
tcataagatgcttcca

SEQ ID NO: 1249 - DNA, 16 bp, Artificial Sequence
  Synthetic oligonucleotide
tttcataagatgcttc

SEQ ID NO: 1250 - DNA, 16 bp, Artificial Sequence
  Synthetic oligonucleotide
aacctgtaatgtggga

SEQ ID NO: 1251 - DNA, 16 bp, Artificial Sequence
  Synthetic oligonucleotide
tagtcaacctgtaatg

SEQ ID NO: 1252 - DNA, 16 bp, Artificial Sequence
  Synthetic oligonucleotide
atttgagcattcagtt

SEQ ID NO: 1253 - DNA, 16 bp, Artificial Sequence
  Synthetic oligonucleotide
aaagatgtctaagtgc

SEQ ID NO: 1254 - DNA, 16 bp, Artificial Sequence
  Synthetic oligonucleotide
ttacagtataaggaga

SEQ ID NO: 1255 - DNA, 16 bp, Artificial Sequence
  Synthetic oligonucleotide
gagaaagaatggtcat

SEQ ID NO: 1256 - DNA, 16 bp, Artificial Sequence
  Synthetic oligonucleotide
aagaagcagggctaac

SEQ ID NO: 1257 - DNA, 16 bp, Artificial Sequence
  Synthetic oligonucleotide
actataagattaagta

SEQ ID NO: 1258 - DNA, 16 bp, Artificial Sequence
  Synthetic oligonucleotide
ctctctgcattgtaaa

SEQ ID NO: 1259 - DNA, 16 bp, Artificial Sequence
  Synthetic oligonucleotide
acttaccagattacat

SEQ ID NO: 1260 - DNA, 16 bp, Artificial Sequence
  Synthetic oligonucleotide
gaattggaagccaata

SEQ ID NO: 1261 - DNA, 16 bp, Artificial Sequence
  Synthetic oligonucleotide
gagaattggaagccaa

SEQ ID NO: 1262 - DNA, 16 bp, Artificial Sequence
  Synthetic oligonucleotide
agagagaattggaagc

SEQ ID NO: 1263 - DNA, 16 bp, Artificial Sequence
  Synthetic oligonucleotide
caatgcagagagaatt

SEQ ID NO: 1264 - DNA, 16 bp, Artificial Sequence
  Synthetic oligonucleotide
ttccagcaatgcagag

SEQ ID NO: 1265 - DNA, 16 bp, Artificial Sequence
  Synthetic oligonucleotide
ccaggtaaaagctcat

SEQ ID NO: 1266 - DNA, 16 bp, Artificial Sequence
  Synthetic oligonucleotide
attctaagagcagtct

SEQ ID NO: 1267 - DNA, 16 bp, Artificial Sequence
  Synthetic oligonucleotide
taatttttgcatgcag

SEQ ID NO: 1268 - DNA, 16 bp, Artificial Sequence
  Synthetic oligonucleotide
cttaatttttgcatgc

SEQ ID NO: 1269 - DNA, 16 bp, Artificial Sequence
  Synthetic oligonucleotide
taaagctggtatattt

SEQ ID NO: 1270 - DNA, 16 bp, Artificial Sequence
  Synthetic oligonucleotide
agaaaagcataccatc

SEQ ID NO: 1271 - DNA, 16 bp, Artificial Sequence
  Synthetic oligonucleotide
tccaatctagaaaatt

SEQ ID NO: 1272 - DNA, 16 bp, Artificial Sequence
  Synthetic oligonucleotide
acaatcatatattggc

SEQ ID NO: 1273 - DNA, 16 bp, Artificial Sequence
  Synthetic oligonucleotide
ttagaacagtgttcaa

SEQ ID NO: 1274 - DNA, 16 bp, Artificial Sequence
  Synthetic oligonucleotide
atccttactacaagtt

SEQ ID NO: 1275 - DNA, 16 bp, Artificial Sequence
  Synthetic oligonucleotide
tacaagtgaagctgag

SEQ ID NO: 1276 - DNA, 16 bp, Artificial Sequence
  Synthetic oligonucleotide
ttaaagcctaaactga

SEQ ID NO: 1277 - DNA, 16 bp, Artificial Sequence
  Synthetic oligonucleotide
ctggaattaaagccta

SEQ ID NO: 1278 - DNA, 16 bp, Artificial Sequence
  Synthetic oligonucleotide
tttaaacagacatcag

SEQ ID NO: 1279 - DNA, 16 bp, Artificial Sequence
  Synthetic oligonucleotide
cattgtaaaacacaac

SEQ ID NO: 1280 - DNA, 16 bp, Artificial Sequence
  Synthetic oligonucleotide
ctgcattgtaaaacac

SEQ ID NO: 1281 - DNA, 16 bp, Artificial Sequence
  Synthetic oligonucleotide
cactctctgcattgta

SEQ ID NO: 1282 - DNA, 16 bp, Artificial Sequence
  Synthetic oligonucleotide
accagattacattata

SEQ ID NO: 1283 - DNA, 16 bp, Artificial Sequence
  Synthetic oligonucleotide
ttaccagattacatta

SEQ ID NO: 1284 - DNA, 16 bp, Artificial Sequence
  Synthetic oligonucleotide
aaacttaccagattac

SEQ ID NO: 1285 - DNA, 16 bp, Artificial Sequence
  Synthetic oligonucleotide
aaagtggttgccacct

SEQ ID NO: 1286 - DNA, 16 bp, Artificial Sequence
  Synthetic oligonucleotide
agttagaatactacac

SEQ ID NO: 1287 - DNA, 16 bp, Artificial Sequence
  Synthetic oligonucleotide
caagttagaatactac

SEQ ID NO: 1288 - DNA, 16 bp, Artificial Sequence
  Synthetic oligonucleotide
atgccaaatatagatt

SEQ ID NO: 1289 - DNA, 16 bp, Artificial Sequence
  Synthetic oligonucleotide
atattactgctgtcta

SEQ ID NO: 1290 - DNA, 16 bp, Artificial Sequence
  Synthetic oligonucleotide
aatattactgctgtct

SEQ ID NO: 1291 - DNA, 16 bp, Artificial Sequence
  Synthetic oligonucleotide
gaaaagagggcggtag

SEQ ID NO: 1292 - DNA, 16 bp, Artificial Sequence
  Synthetic oligonucleotide
tggtaaaccaaatagg

SEQ ID NO: 1293 - DNA, 16 bp, Artificial Sequence
  Synthetic oligonucleotide
ctatagctaaaatgac

SEQ ID NO: 1294 - DNA, 16 bp, Artificial Sequence
  Synthetic oligonucleotide
ctgcaacacatgtgga

SEQ ID NO: 1295 - DNA, 16 bp, Artificial Sequence
  Synthetic oligonucleotide
aaagagctggagtggt

SEQ ID NO: 1296 - DNA, 16 bp, Artificial Sequence
  Synthetic oligonucleotide
aagcatataatagtta

SEQ ID NO: 1297 - DNA, 16 bp, Artificial Sequence
  Synthetic oligonucleotide
attctggctaagattt

SEQ ID NO: 1298 - DNA, 16 bp, Artificial Sequence
  Synthetic oligonucleotide
gtttagaaacgaaaat

SEQ ID NO: 1299 - DNA, 16 bp, Artificial Sequence
  Synthetic oligonucleotide
acaaacaatatgcatc

SEQ ID NO: 1300 - DNA, 16 bp, Artificial Sequence
  Synthetic oligonucleotide
ctgtaattttattgcc

SEQ ID NO: 1301 - DNA, 16 bp, Artificial Sequence
  Synthetic oligonucleotide
agtagattagtacacc

SEQ ID NO: 1302 - DNA, 16 bp, Artificial Sequence
  Synthetic oligonucleotide
acaataggaggagaaa

SEQ ID NO: 1303 - DNA, 16 bp, Artificial Sequence
  Synthetic oligonucleotide
agtcactgtataaaac

SEQ ID NO: 1304 - DNA, 16 bp, Artificial Sequence
  Synthetic oligonucleotide
caaacaattgtgacat

SEQ ID NO: 1305 - DNA, 16 bp, Artificial Sequence
  Synthetic oligonucleotide
aattaccaagtatact

SEQ ID NO: 1306 - DNA, 16 bp, Artificial Sequence
  Synthetic oligonucleotide
ctttttcaggactaag

SEQ ID NO: 1307 - DNA, 16 bp, Artificial Sequence
  Synthetic oligonucleotide
caacctacacagagca

SEQ ID NO: 1308 - DNA, 16 bp, Artificial Sequence
  Synthetic oligonucleotide
aaagattctaggctta

SEQ ID NO: 1309 - DNA, 16 bp, Artificial Sequence
  Synthetic oligonucleotide
acttcctaagattctg

SEQ ID NO: 1310 - DNA, 16 bp, Artificial Sequence
  Synthetic oligonucleotide
gtgatagaatcttaaa

SEQ ID NO: 1311 - DNA, 16 bp, Artificial Sequence
  Synthetic oligonucleotide
aaggtttgattacata

SEQ ID NO: 1312 - DNA, 16 bp, Artificial Sequence
  Synthetic oligonucleotide
tttaagagaggtaaac

SEQ ID NO: 1313 - DNA, 16 bp, Artificial Sequence
  Synthetic oligonucleotide
tactaagattaacgat

SEQ ID NO: 1314 - DNA, 16 bp, Artificial Sequence
  Synthetic oligonucleotide
ctactaagattaacga

SEQ ID NO: 1315 - DNA, 16 bp, Artificial Sequence
  Synthetic oligonucleotide
ccactttaggaacaat

SEQ ID NO: 1316 - DNA, 16 bp, Artificial Sequence
  Synthetic oligonucleotide
caacacattaagttgt

SEQ ID NO: 1317 - DNA, 16 bp, Artificial Sequence
  Synthetic oligonucleotide
cccaacacattaagtt

SEQ ID NO: 1318 - DNA, 16 bp, Artificial Sequence
  Synthetic oligonucleotide
ctagacagcagaggga

SEQ ID NO: 1319 - DNA, 16 bp, Artificial Sequence
  Synthetic oligonucleotide
gtcaattcttgtcatg

SEQ ID NO: 1320 - DNA, 16 bp, Artificial Sequence
  Synthetic oligonucleotide
caagatccatacacaa

SEQ ID NO: 1321 - DNA, 16 bp, Artificial Sequence
  Synthetic oligonucleotide
acctaataatctacag

SEQ ID NO: 1322 - DNA, 16 bp, Artificial Sequence
  Synthetic oligonucleotide
acttttcaacctaata

SEQ ID NO: 1323 - DNA, 16 bp, Artificial Sequence
  Synthetic oligonucleotide
tagtcattgtgaccac

SEQ ID NO: 1324 - DNA, 16 bp, Artificial Sequence
  Synthetic oligonucleotide
tagctaaatcatttga

SEQ ID NO: 1325 - DNA, 16 bp, Artificial Sequence
  Synthetic oligonucleotide
actaatacctcagatt

SEQ ID NO: 1326 - DNA, 16 bp, Artificial Sequence
  Synthetic oligonucleotide
tgatatatattaaggg

SEQ ID NO: 1327 - DNA, 16 bp, Artificial Sequence
  Synthetic oligonucleotide
acttaattgtccttat

SEQ ID NO: 1328 - DNA, 16 bp, Artificial Sequence
  Synthetic oligonucleotide
acacttaattgtcctt

SEQ ID NO: 1329 - DNA, 16 bp, Artificial Sequence
  Synthetic oligonucleotide
cttaatttgctactat

SEQ ID NO: 1330 - DNA, 16 bp, Artificial Sequence
  Synthetic oligonucleotide
ataaggtaacgacttt

SEQ ID NO: 1331 - DNA, 16 bp, Artificial Sequence
  Synthetic oligonucleotide
gacaaggataaccaat

SEQ ID NO: 1332 - DNA, 16 bp, Artificial Sequence
  Synthetic oligonucleotide
tatattaggactttta

SEQ ID NO: 1333 - DNA, 16 bp, Artificial Sequence
  Synthetic oligonucleotide
atatatacgatggctt

SEQ ID NO: 1334 - DNA, 16 bp, Artificial Sequence
  Synthetic oligonucleotide
ctgcatgcaccaaaag

SEQ ID NO: 1335 - DNA, 16 bp, Artificial Sequence
  Synthetic oligonucleotide
ctgttaccaggagtag

SEQ ID NO: 1336 - DNA, 16 bp, Artificial Sequence
  Synthetic oligonucleotide
atgtattactgttacc

SEQ ID NO: 1337 - DNA, 16 bp, Artificial Sequence
  Synthetic oligonucleotide
aagatttctggttact

SEQ ID NO: 1338 - DNA, 16 bp, Artificial Sequence
  Synthetic oligonucleotide
tgaagatttctggtta

SEQ ID NO: 1339 - DNA, 16 bp, Artificial Sequence
  Synthetic oligonucleotide
catgaagatttctggt

SEQ ID NO: 1340 - DNA, 16 bp, Artificial Sequence
  Synthetic oligonucleotide
attgcatgaagatttc

SEQ ID NO: 1341 - DNA, 16 bp, Artificial Sequence
  Synthetic oligonucleotide
attatgtctcttgttt

SEQ ID NO: 1342 - DNA, 16 bp, Artificial Sequence
  Synthetic oligonucleotide
cttctttgcaaaacta

SEQ ID NO: 1343 - DNA, 16 bp, Artificial Sequence
  Synthetic oligonucleotide
acagttatgccaaata

SEQ ID NO: 1344 - DNA, 16 bp, Artificial Sequence
  Synthetic oligonucleotide
tcacagttatgccaaa

SEQ ID NO: 1345 - DNA, 16 bp, Artificial Sequence
  Synthetic oligonucleotide
aatcacagttatgcca

SEQ ID NO: 1346 - DNA, 16 bp, Artificial Sequence
  Synthetic oligonucleotide
aaagaatcacagttat

SEQ ID NO: 1347 - DNA, 16 bp, Artificial Sequence
  Synthetic oligonucleotide
taaaagaatcacagtt

SEQ ID NO: 1348 - DNA, 16 bp, Artificial Sequence
  Synthetic oligonucleotide
gtaattgtcctaaaag

SEQ ID NO: 1349 - DNA, 16 bp, Artificial Sequence
  Synthetic oligonucleotide
tgtgaactagttcagg

SEQ ID NO: 1350 - DNA, 16 bp, Artificial Sequence
  Synthetic oligonucleotide
gaagtttccttgtctg

SEQ ID NO: 1351 - DNA, 16 bp, Artificial Sequence
  Synthetic oligonucleotide
tactgtgtaagtctta

SEQ ID NO: 1352 - DNA, 16 bp, Artificial Sequence
  Synthetic oligonucleotide
ggtactgtgtaagtct

SEQ ID NO: 1353 - DNA, 16 bp, Artificial Sequence
  Synthetic oligonucleotide
gaggtactgtgtaagt

SEQ ID NO: 1354 - DNA, 16 bp, Artificial Sequence
  Synthetic oligonucleotide
aaacgaggtactgtgt

SEQ ID NO: 1355 - DNA, 16 bp, Artificial Sequence
  Synthetic oligonucleotide
ctgcagttcctgaagt

SEQ ID NO: 1356 - DNA, 16 bp, Artificial Sequence
  Synthetic oligonucleotide
agcactgcagttcctg

SEQ ID NO: 1357 - DNA, 16 bp, Artificial Sequence
  Synthetic oligonucleotide
taagcactgcagttcc

SEQ ID NO: 1358 - DNA, 16 bp, Artificial Sequence
  Synthetic oligonucleotide
cataagcactgcagtt

SEQ ID NO: 1359 - DNA, 16 bp, Artificial Sequence
  Synthetic oligonucleotide
tcctagttatagatta

SEQ ID NO: 1360 - DNA, 16 bp, Artificial Sequence
  Synthetic oligonucleotide
caggagtagtcctagt

SEQ ID NO: 1361 - DNA, 16 bp, Artificial Sequence
  Synthetic oligonucleotide
ctaaaacaatggaatg

SEQ ID NO: 1362 - DNA, 16 bp, Artificial Sequence
  Synthetic oligonucleotide
catgaattaaagtatt

SEQ ID NO: 1363 - DNA, 16 bp, Artificial Sequence
  Synthetic oligonucleotide
agtaagcttcatgaat

SEQ ID NO: 1364 - DNA, 16 bp, Artificial Sequence
  Synthetic oligonucleotide
cgagactctgacacca

SEQ ID NO: 1365 - DNA, 16 bp, Artificial Sequence
  Synthetic oligonucleotide
gtttatgaggccaagg

SEQ ID NO: 1366 - DNA, 16 bp, Artificial Sequence
  Synthetic oligonucleotide
gcaaaacaggtttatg

SEQ ID NO: 1367 - DNA, 16 bp, Artificial Sequence
  Synthetic oligonucleotide
atgagttctgcaaaac

SEQ ID NO: 1368 - DNA, 16 bp, Artificial Sequence
  Synthetic oligonucleotide
catctggtaggcactc

SEQ ID NO: 1369 - DNA, 16 bp, Artificial Sequence
  Synthetic oligonucleotide
tacccagtgccttgtg

SEQ ID NO: 1370 - DNA, 16 bp, Artificial Sequence
  Synthetic oligonucleotide
gataccatatacccag

SEQ ID NO: 1371 - DNA, 16 bp, Artificial Sequence
  Synthetic oligonucleotide
acctaaggaccgggat

SEQ ID NO: 1372 - DNA, 16 bp, Artificial Sequence
  Synthetic oligonucleotide
cactagcactacctaa

SEQ ID NO: 1373 - DNA, 16 bp, Artificial Sequence
  Synthetic oligonucleotide
gtaagatattacagac

SEQ ID NO: 1374 - DNA, 16 bp, Artificial Sequence
  Synthetic oligonucleotide
accaaaggccttagta

SEQ ID NO: 1375 - DNA, 16 bp, Artificial Sequence
  Synthetic oligonucleotide
actaaaatacgcatcg

SEQ ID NO: 1376 - DNA, 16 bp, Artificial Sequence
  Synthetic oligonucleotide
accaaaccccttcttt

SEQ ID NO: 1377 - DNA, 16 bp, Artificial Sequence
  Synthetic oligonucleotide
tggcacagagaccaaa

SEQ ID NO: 1378 - DNA, 16 bp, Artificial Sequence
  Synthetic oligonucleotide
ttatagagctggcaca

SEQ ID NO: 1379 - DNA, 16 bp, Artificial Sequence
  Synthetic oligonucleotide
gcaaaacaattataga

SEQ ID NO: 1380 - DNA, 16 bp, Artificial Sequence
  Synthetic oligonucleotide
agagtttcagtggaat

SEQ ID NO: 1381 - DNA, 16 bp, Artificial Sequence
  Synthetic oligonucleotide
cttgatcgaagagttt

SEQ ID NO: 1382 - DNA, 16 bp, Artificial Sequence
  Synthetic oligonucleotide
ataaagtagcttgatc

SEQ ID NO: 1383 - DNA, 16 bp, Artificial Sequence
  Synthetic oligonucleotide
agtgatttacataaag

SEQ ID NO: 1384 - DNA, 16 bp, Artificial Sequence
  Synthetic oligonucleotide
caagtttattccttta

SEQ ID NO: 1385 - DNA, 16 bp, Artificial Sequence
  Synthetic oligonucleotide
caatataatcaagttt

SEQ ID NO: 1386 - DNA, 16 bp, Artificial Sequence
  Synthetic oligonucleotide
atgtgtacagtaattg

SEQ ID NO: 1387 - DNA, 16 bp, Artificial Sequence
  Synthetic oligonucleotide
atacaccttaatgtgt

SEQ ID NO: 1388 - DNA, 16 bp, Artificial Sequence
  Synthetic oligonucleotide
caatatgaatatctga

SEQ ID NO: 1389 - DNA, 16 bp, Artificial Sequence
  Synthetic oligonucleotide
tattacacatttgggt

SEQ ID NO: 1390 - DNA, 16 bp, Artificial Sequence
  Synthetic oligonucleotide
aaactggaatattaca

SEQ ID NO: 1391 - DNA, 16 bp, Artificial Sequence
  Synthetic oligonucleotide
tatgcagagaaaactg

SEQ ID NO: 1392 - DNA, 16 bp, Artificial Sequence
  Synthetic oligonucleotide
gataaaactattaatt

SEQ ID NO: 1393 - DNA, 16 bp, Artificial Sequence
  Synthetic oligonucleotide
ttgtacccagataaaa

SEQ ID NO: 1394 - DNA, 16 bp, Artificial Sequence
  Synthetic oligonucleotide
cacctgtttatttgta

SEQ ID NO: 1395 - DNA, 16 bp, Artificial Sequence
  Synthetic oligonucleotide
ttttacatagaagttt

SEQ ID NO: 1396 - DNA, 16 bp, Artificial Sequence
  Synthetic oligonucleotide
catagtgatttttaca

SEQ ID NO: 1397 - DNA, 16 bp, Artificial Sequence
  Synthetic oligonucleotide
ttcagaaatcatagtg

SEQ ID NO: 1398 - DNA, 16 bp, Artificial Sequence
  Synthetic oligonucleotide
ttcacatagcaattca

SEQ ID NO: 1399 - DNA, 16 bp, Artificial Sequence
  Synthetic oligonucleotide
atctgtagtttcacat

SEQ ID NO: 1400 - DNA, 16 bp, Artificial Sequence
  Synthetic oligonucleotide
gttccaaagatctgta

SEQ ID NO: 1401 - DNA, 16 bp, Artificial Sequence
  Synthetic oligonucleotide
aacaccctacctaaac

SEQ ID NO: 1402 - DNA, 16 bp, Artificial Sequence
  Synthetic oligonucleotide
cctgaagtatggccat

SEQ ID NO: 1403 - DNA, 16 bp, Artificial Sequence
  Synthetic oligonucleotide
taaatatcccctcata

SEQ ID NO: 1404 - DNA, 16 bp, Artificial Sequence
  Synthetic oligonucleotide
caagaggcctaaatat

SEQ ID NO: 1405 - DNA, 16 bp, Artificial Sequence
  Synthetic oligonucleotide
tcaaaaattcaagagg

SEQ ID NO: 1406 - DNA, 16 bp, Artificial Sequence
  Synthetic oligonucleotide
ccatctacatcaaaaa

SEQ ID NO: 1407 - DNA, 16 bp, Artificial Sequence
  Synthetic oligonucleotide
aaaaaatgcccatcta

SEQ ID NO: 1408 - DNA, 16 bp, Artificial Sequence
  Synthetic oligonucleotide
ccactaccttaaaaaa

SEQ ID NO: 1409 - DNA, 16 bp, Artificial Sequence
  Synthetic oligonucleotide
aaaggtaattaaccac

SEQ ID NO: 1410 - DNA, 16 bp, Artificial Sequence
  Synthetic oligonucleotide
agttcacataaaggta

SEQ ID NO: 1411 - DNA, 16 bp, Artificial Sequence
  Synthetic oligonucleotide
actcagttaaatagag

SEQ ID NO: 1412 - DNA, 16 bp, Artificial Sequence
  Synthetic oligonucleotide
cctatgcagtgtgact

SEQ ID NO: 1413 - DNA, 16 bp, Artificial Sequence
  Synthetic oligonucleotide
tcctatgcagtgtgac

SEQ ID NO: 1414 - DNA, 16 bp, Artificial Sequence
  Synthetic oligonucleotide
attcctatgcagtgtg

SEQ ID NO: 1415 - DNA, 16 bp, Artificial Sequence
  Synthetic oligonucleotide
ctaaattcctatgcag

SEQ ID NO: 1416 - DNA, 16 bp, Artificial Sequence
  Synthetic oligonucleotide
ataacctataaaagtt

SEQ ID NO: 1417 - DNA, 16 bp, Artificial Sequence
  Synthetic oligonucleotide
gacaaaattgtgcaat

SEQ ID NO: 1418 - DNA, 16 bp, Artificial Sequence
  Synthetic oligonucleotide
aggacaaaattgtgca

SEQ ID NO: 1419 - DNA, 16 bp, Artificial Sequence
  Synthetic oligonucleotide
ttaggacaaaattgtg

SEQ ID NO: 1420 - DNA, 16 bp, Artificial Sequence
  Synthetic oligonucleotide
tattaggacaaaattg

SEQ ID NO: 1421 - DNA, 16 bp, Artificial Sequence
  Synthetic oligonucleotide
tatattaggacaaaat

SEQ ID NO: 1422 - DNA, 16 bp, Artificial Sequence
  Synthetic oligonucleotide
ccctaaaaaaagttat

SEQ ID NO: 1423 - DNA, 16 bp, Artificial Sequence
  Synthetic oligonucleotide
aactgctgggttctaa

SEQ ID NO: 1424 - DNA, 16 bp, Artificial Sequence
  Synthetic oligonucleotide
gtaactgctgggttct

SEQ ID NO: 1425 - DNA, 16 bp, Artificial Sequence
  Synthetic oligonucleotide
tttaaggtaactgctg

SEQ ID NO: 1426 - DNA, 16 bp, Artificial Sequence
  Synthetic oligonucleotide
tgctatccagtattaa

SEQ ID NO: 1427 - DNA, 16 bp, Artificial Sequence
  Synthetic oligonucleotide
tcttaatctagttatg

SEQ ID NO: 1428 - DNA, 16 bp, Artificial Sequence
  Synthetic oligonucleotide
gcacttcaaactatta

SEQ ID NO: 1429 - DNA, 16 bp, Artificial Sequence
  Synthetic oligonucleotide
actttcggataaaaca

SEQ ID NO: 1430 - DNA, 16 bp, Artificial Sequence
  Synthetic oligonucleotide
cttttgttaaaccatt

SEQ ID NO: 1431 - DNA, 16 bp, Artificial Sequence
  Synthetic oligonucleotide
ctttaaaatctctaca

SEQ ID NO: 1432 - DNA, 16 bp, Artificial Sequence
  Synthetic oligonucleotide
attctccccctttaaa

SEQ ID NO: 1433 - DNA, 16 bp, Artificial Sequence
  Synthetic oligonucleotide
gctgtaataattaggt

SEQ ID NO: 1434 - DNA, 16 bp, Artificial Sequence
  Synthetic oligonucleotide
gtctttaaggctgtaa

SEQ ID NO: 1435 - DNA, 16 bp, Artificial Sequence
  Synthetic oligonucleotide
aacaaggatttttgtc

SEQ ID NO: 1436 - DNA, 16 bp, Artificial Sequence
  Synthetic oligonucleotide
aaaaacttcaacaagg

SEQ ID NO: 1437 - DNA, 16 bp, Artificial Sequence
  Synthetic oligonucleotide
ctaagtctatgtaatt

SEQ ID NO: 1438 - DNA, 16 bp, Artificial Sequence
  Synthetic oligonucleotide
tgttaatgcctaagtc

SEQ ID NO: 1439 - DNA, 16 bp, Artificial Sequence
  Synthetic oligonucleotide
ccacaaacatgttaat

SEQ ID NO: 1440 - DNA, 16 bp, Artificial Sequence
  Synthetic oligonucleotide
ctatattcttccacaa

SEQ ID NO: 1441 - DNA, 16 bp, Artificial Sequence
  Synthetic oligonucleotide
actcaaatgatacaat

SEQ ID NO: 1442 - DNA, 16 bp, Artificial Sequence
  Synthetic oligonucleotide
tagaatgcctacttgg

SEQ ID NO: 1443 - DNA, 16 bp, Artificial Sequence
  Synthetic oligonucleotide
aaagttaggttctaaa

SEQ ID NO: 1444 - DNA, 16 bp, Artificial Sequence
  Synthetic oligonucleotide
acagttttgataacct

SEQ ID NO: 1445 - DNA, 16 bp, Artificial Sequence
  Synthetic oligonucleotide
aatggtgacaacagtt

SEQ ID NO: 1446 - DNA, 16 bp, Artificial Sequence
  Synthetic oligonucleotide
aacatgccccacaaag

SEQ ID NO: 1447 - DNA, 16 bp, Artificial Sequence
  Synthetic oligonucleotide
ctgtaacttaacatgc

SEQ ID NO: 1448 - DNA, 16 bp, Artificial Sequence
  Synthetic oligonucleotide
atgagatgaacttgtg

SEQ ID NO: 1449 - DNA, 16 bp, Artificial Sequence
  Synthetic oligonucleotide
ggaatacaaatgagat

SEQ ID NO: 1450 - DNA, 16 bp, Artificial Sequence
  Synthetic oligonucleotide
gttatatactgtttga

SEQ ID NO: 1451 - DNA, 16 bp, Artificial Sequence
  Synthetic oligonucleotide
gtttttgctgtctaaa

SEQ ID NO: 1452 - DNA, 16 bp, Artificial Sequence
  Synthetic oligonucleotide
cttcagatagtttttg

SEQ ID NO: 1453 - DNA, 16 bp, Artificial Sequence
  Synthetic oligonucleotide
aatggaaatcttcaga

SEQ ID NO: 1454 - DNA, 16 bp, Artificial Sequence
  Synthetic oligonucleotide
caagaaatcattactt

SEQ ID NO: 1455 - DNA, 16 bp, Artificial Sequence
  Synthetic oligonucleotide
tactacacaattatca

SEQ ID NO: 1456 - DNA, 16 bp, Artificial Sequence
  Synthetic oligonucleotide
taaaaaacattactac

SEQ ID NO: 1457 - DNA, 16 bp, Artificial Sequence
  Synthetic oligonucleotide
gaagttactaaatata

SEQ ID NO: 1458 - DNA, 16 bp, Artificial Sequence
  Synthetic oligonucleotide
attaacacagaagtta

SEQ ID NO: 1459 - DNA, 16 bp, Artificial Sequence
  Synthetic oligonucleotide
cagaattcatgctatc

SEQ ID NO: 1460 - DNA, 16 bp, Artificial Sequence
  Synthetic oligonucleotide
agtttctcaatgcaga

SEQ ID NO: 1461 - DNA, 16 bp, Artificial Sequence
  Synthetic oligonucleotide
atgacagctattcagt

SEQ ID NO: 1462 - DNA, 16 bp, Artificial Sequence
  Synthetic oligonucleotide
gtttcattttatgaca

SEQ ID NO: 1463 - DNA, 16 bp, Artificial Sequence
  Synthetic oligonucleotide
ttagaaagaaagtttc

SEQ ID NO: 1464 - DNA, 16 bp, Artificial Sequence
  Synthetic oligonucleotide
gagtatctttctttag

SEQ ID NO: 1465 - DNA, 16 bp, Artificial Sequence
  Synthetic oligonucleotide
aactcatgtgagtatc

SEQ ID NO: 1466 - DNA, 16 bp, Artificial Sequence
  Synthetic oligonucleotide
ttcttcaagaactcat

SEQ ID NO: 1467 - DNA, 16 bp, Artificial Sequence
  Synthetic oligonucleotide
agttatgactattctt

SEQ ID NO: 1468 - DNA, 16 bp, Artificial Sequence
  Synthetic oligonucleotide
aaacacagatcttaat

SEQ ID NO: 1469 - DNA, 16 bp, Artificial Sequence
  Synthetic oligonucleotide
actattaaactaaaac

SEQ ID NO: 1470 - DNA, 16 bp, Artificial Sequence
  Synthetic oligonucleotide
cccaaacaggcacttc

SEQ ID NO: 1471 - DNA, 16 bp, Artificial Sequence
  Synthetic oligonucleotide
tatcattatcccaaac

SEQ ID NO: 1472 - DNA, 16 bp, Artificial Sequence
  Synthetic oligonucleotide
taaattacctatcatt

SEQ ID NO: 1473 - DNA, 16 bp, Artificial Sequence
  Synthetic oligonucleotide
cctaaattcatctaaa

SEQ ID NO: 1474 - DNA, 16 bp, Artificial Sequence
  Synthetic oligonucleotide
ctgcagataacttttt

SEQ ID NO: 1475 - DNA, 16 bp, Artificial Sequence
  Synthetic oligonucleotide
ctcaacatatctgcag

SEQ ID NO: 1476 - DNA, 16 bp, Artificial Sequence
  Synthetic oligonucleotide
ctgtaacccagttagc

SEQ ID NO: 1477 - DNA, 16 bp, Artificial Sequence
  Synthetic oligonucleotide
gaattggaaactttcg

SEQ ID NO: 1478 - DNA, 16 bp, Artificial Sequence
  Synthetic oligonucleotide
acacaagacagtggaa

SEQ ID NO: 1479 - DNA, 16 bp, Artificial Sequence
  Synthetic oligonucleotide
caaattttagatcact

SEQ ID NO: 1480 - DNA, 16 bp, Artificial Sequence
  Synthetic oligonucleotide
ataaaaagcatcctcc

SEQ ID NO: 1481 - DNA, 16 bp, Artificial Sequence
  Synthetic oligonucleotide
tttcacacagccagga

SEQ ID NO: 1482 - DNA, 16 bp, Artificial Sequence
  Synthetic oligonucleotide
tactagtaagaaattg

SEQ ID NO: 1483 - DNA, 16 bp, Artificial Sequence
  Synthetic oligonucleotide
aagaaatagtactagt

SEQ ID NO: 1484 - DNA, 16 bp, Artificial Sequence
  Synthetic oligonucleotide
gttaaaatacattcca

SEQ ID NO: 1485 - DNA, 16 bp, Artificial Sequence
  Synthetic oligonucleotide
cactatacaaaaatag

SEQ ID NO: 1486 - DNA, 16 bp, Artificial Sequence
  Synthetic oligonucleotide
ttcagtttacactata

SEQ ID NO: 1487 - DNA, 16 bp, Artificial Sequence
  Synthetic oligonucleotide
aatgtgcatgtttcag

SEQ ID NO: 1488 - DNA, 16 bp, Artificial Sequence
  Synthetic oligonucleotide
gcacaatgtacaaaat

SEQ ID NO: 1489 - DNA, 16 bp, Artificial Sequence
  Synthetic oligonucleotide
gtcccacaaaagaaag

SEQ ID NO: 1490 - DNA, 16 bp, Artificial Sequence
  Synthetic oligonucleotide
caactggatcacactg

SEQ ID NO: 1491 - DNA, 16 bp, Artificial Sequence
  Synthetic oligonucleotide
atgatggaaaacaact

SEQ ID NO: 1492 - DNA, 16 bp, Artificial Sequence
  Synthetic oligonucleotide
gcgcaaccaaatgatg

SEQ ID NO: 1493 - DNA, 16 bp, Artificial Sequence
  Synthetic oligonucleotide
gaccaacattcctagg

SEQ ID NO: 1494 - DNA, 16 bp, Artificial Sequence
  Synthetic oligonucleotide
gtttgatatgaccaac

SEQ ID NO: 1495 - DNA, 16 bp, Artificial Sequence
  Synthetic oligonucleotide
ggtcatttttaatgtt

SEQ ID NO: 1496 - DNA, 16 bp, Artificial Sequence
  Synthetic oligonucleotide
taaaagagtggtcatt

SEQ ID NO: 1497 - DNA, 16 bp, Artificial Sequence
  Synthetic oligonucleotide
actcctataaacattt

SEQ ID NO: 1498 - DNA, 16 bp, Artificial Sequence
  Synthetic oligonucleotide
acagcacatactccta

SEQ ID NO: 1499 - DNA, 16 bp, Artificial Sequence
  Synthetic oligonucleotide
gatcacttcacagcac

SEQ ID NO: 1500 - DNA, 16 bp, Artificial Sequence
  Synthetic oligonucleotide
acagttcatgacaaaa

SEQ ID NO: 1501 - DNA, 16 bp, Artificial Sequence
  Synthetic oligonucleotide
taggagtagtacagtt

SEQ ID NO: 1502 - DNA, 16 bp, Artificial Sequence
  Synthetic oligonucleotide
tacaataattaggagt

SEQ ID NO: 1503 - DNA, 16 bp, Artificial Sequence
  Synthetic oligonucleotide
ctgtattgtcggatct

SEQ ID NO: 1504 - DNA, 16 bp, Artificial Sequence
  Synthetic oligonucleotide
gatttttttcaatctg

SEQ ID NO: 1505 - DNA, 16 bp, Artificial Sequence
  Synthetic oligonucleotide
tacattataatgcatt

SEQ ID NO: 1506 - DNA, 16 bp, Artificial Sequence
  Synthetic oligonucleotide
atgcagcagggaaggc

SEQ ID NO: 1507 - DNA, 16 bp, Artificial Sequence
  Synthetic oligonucleotide
tccaaaggagtcttac

SEQ ID NO: 1508 - DNA, 16 bp, Artificial Sequence
  Synthetic oligonucleotide
gaaacccaaggtacat

SEQ ID NO: 1509 - DNA, 16 bp, Artificial Sequence
  Synthetic oligonucleotide
ctccatgaccttcaag

SEQ ID NO: 1510 - DNA, 16 bp, Artificial Sequence
  Synthetic oligonucleotide
aggcagtctacttcaa

SEQ ID NO: 1511 - DNA, 16 bp, Artificial Sequence
  Synthetic oligonucleotide
ccaaataaaggcttaa

SEQ ID NO: 1512 - DNA, 16 bp, Artificial Sequence
  Synthetic oligonucleotide
tacaagtaaaggtgat

SEQ ID NO: 1513 - DNA, 16 bp, Artificial Sequence
  Synthetic oligonucleotide
gaactgaattataagt

SEQ ID NO: 1514 - DNA, 16 bp, Artificial Sequence
  Synthetic oligonucleotide
tatcaaggtttggatc

SEQ ID NO: 1515 - DNA, 16 bp, Artificial Sequence
  Synthetic oligonucleotide
taaaattgctgtgtgt

SEQ ID NO: 1516 - DNA, 16 bp, Artificial Sequence
  Synthetic oligonucleotide
atcaatcatataagac

SEQ ID NO: 1517 - DNA, 16 bp, Artificial Sequence
  Synthetic oligonucleotide
tcacaactattctaca

SEQ ID NO: 1518 - DNA, 16 bp, Artificial Sequence
  Synthetic oligonucleotide
ctagagatacctaaaa

SEQ ID NO: 1519 - DNA, 16 bp, Artificial Sequence
  Synthetic oligonucleotide
aatctatgttacttag

SEQ ID NO: 1520 - DNA, 16 bp, Artificial Sequence
  Synthetic oligonucleotide
caaaggacatgtagtt

SEQ ID NO: 1521 - DNA, 16 bp, Artificial Sequence
  Synthetic oligonucleotide
agcccaatggtataag

SEQ ID NO: 1522 - DNA, 16 bp, Artificial Sequence
  Synthetic oligonucleotide
atcacagggaaggata

SEQ ID NO: 1523 - DNA, 16 bp, Artificial Sequence
  Synthetic oligonucleotide
aataatcagagtggac

SEQ ID NO: 1524 - DNA, 16 bp, Artificial Sequence
  Synthetic oligonucleotide
acaggagctaaggcaa

SEQ ID NO: 1525 - DNA, 16 bp, Artificial Sequence
  Synthetic oligonucleotide
aacttttccggcatca

SEQ ID NO: 1526 - DNA, 16 bp, Artificial Sequence
  Synthetic oligonucleotide
tgaaaatctaggtgtc

SEQ ID NO: 1527 - DNA, 16 bp, Artificial Sequence
  Synthetic oligonucleotide
agtattgtaaggactt

SEQ ID NO: 1528 - DNA, 16 bp, Artificial Sequence
  Synthetic oligonucleotide
taacttttactaaagg

SEQ ID NO: 1529 - DNA, 16 bp, Artificial Sequence
  Synthetic oligonucleotide
actcaggcagtgactc

SEQ ID NO: 1530 - DNA, 16 bp, Artificial Sequence
  Synthetic oligonucleotide
atgtaacagtgtgcaa

SEQ ID NO: 1531 - DNA, 16 bp, Artificial Sequence
  Synthetic oligonucleotide
gaatgttcacgacaaa

SEQ ID NO: 1532 - DNA, 16 bp, Artificial Sequence
  Synthetic oligonucleotide
aattgtttaagtctat

SEQ ID NO: 1533 - DNA, 16 bp, Artificial Sequence
  Synthetic oligonucleotide
gtccatgataactatt

SEQ ID NO: 1534 - DNA, 16 bp, Artificial Sequence
  Synthetic oligonucleotide
gtacagattggccagg

SEQ ID NO: 1535 - DNA, 16 bp, Artificial Sequence
  Synthetic oligonucleotide
actccactgctctaat

SEQ ID NO: 1536 - DNA, 16 bp, Artificial Sequence
  Synthetic oligonucleotide
actagactatacagta

SEQ ID NO: 1537 - DNA, 16 bp, Artificial Sequence
  Synthetic oligonucleotide
ctagaaagattttgat

SEQ ID NO: 1538 - DNA, 16 bp, Artificial Sequence
  Synthetic oligonucleotide
aagttagggcataaaa

SEQ ID NO: 1539 - DNA, 16 bp, Artificial Sequence
  Synthetic oligonucleotide
tattaaagttagcctg

SEQ ID NO: 1540 - DNA, 16 bp, Artificial Sequence
  Synthetic oligonucleotide
gttcaaaatattgatc

SEQ ID NO: 1541 - DNA, 16 bp, Artificial Sequence
  Synthetic oligonucleotide
aaaaaccactacttgg

SEQ ID NO: 1542 - DNA, 16 bp, Artificial Sequence
  Synthetic oligonucleotide
aagttataatgtcaat

SEQ ID NO: 1543 - DNA, 16 bp, Artificial Sequence
  Synthetic oligonucleotide
acagagaattggcaac

SEQ ID NO: 1544 - DNA, 16 bp, Artificial Sequence
  Synthetic oligonucleotide
cacacagagaattggc

SEQ ID NO: 1545 - DNA, 16 bp, Artificial Sequence
  Synthetic oligonucleotide
caccagtaccatttgc

SEQ ID NO: 1546 - DNA, 16 bp, Artificial Sequence
  Synthetic oligonucleotide
atatatagtgcaaatt

SEQ ID NO: 1547 - DNA, 16 bp, Artificial Sequence
  Synthetic oligonucleotide
aacagtgttcaatcat

SEQ ID NO: 1548 - DNA, 16 bp, Artificial Sequence
  Synthetic oligonucleotide
tctcaaaggtgagtca

SEQ ID NO: 1549 - DNA, 16 bp, Artificial Sequence
  Synthetic oligonucleotide
agtaatttactgggaa

SEQ ID NO: 1550 - DNA, 16 bp, Artificial Sequence
  Synthetic oligonucleotide
taagaatagtattctg

SEQ ID NO: 1551 - DNA, 16 bp, Artificial Sequence
  Synthetic oligonucleotide
ctcctttactgtacta

SEQ ID NO: 1552 - DNA, 16 bp, Artificial Sequence
  Synthetic oligonucleotide
gtcttatagtttacca

SEQ ID NO: 1553 - DNA, 16 bp, Artificial Sequence
  Synthetic oligonucleotide
gtaaaatccattggat

SEQ ID NO: 1554 - DNA, 16 bp, Artificial Sequence
  Synthetic oligonucleotide
tactgttaccaggagt

SEQ ID NO: 1555 - DNA, 16 bp, Artificial Sequence
  Synthetic oligonucleotide
attactgttaccagga

SEQ ID NO: 1556 - DNA, 16 bp, Artificial Sequence
  Synthetic oligonucleotide
ttactaaaacaatgga

SEQ ID NO: 1557 - DNA, 16 bp, Artificial Sequence
  Synthetic oligonucleotide
gcttcatgaattaaag

SEQ ID NO: 1558 - DNA, 16 bp, Artificial Sequence
  Synthetic oligonucleotide
ggattatgtctcttgt

SEQ ID NO: 1559 - DNA, 16 bp, Artificial Sequence
  Synthetic oligonucleotide
tagcactacctaagga

SEQ ID NO: 1560 - DNA, 16 bp, Artificial Sequence
  Synthetic oligonucleotide
aaaatcctactgtcgc

SEQ ID NO: 1561 - DNA, 16 bp, Artificial Sequence
  Synthetic oligonucleotide
gtttgaaaaatcctac

SEQ ID NO: 1562 - DNA, 16 bp, Artificial Sequence
  Synthetic oligonucleotide
caggtttgaaaaatcc

SEQ ID NO: 1563 - DNA, 16 bp, Artificial Sequence
  Synthetic oligonucleotide
cataccaggtttgaaa

SEQ ID NO: 1564 - DNA, 16 bp, Artificial Sequence
  Synthetic oligonucleotide
ttcataccaggtttga

SEQ ID NO: 1565 - DNA, 16 bp, Artificial Sequence
  Synthetic oligonucleotide
atagggttctgtctat

SEQ ID NO: 1566 - DNA, 16 bp, Artificial Sequence
  Synthetic oligonucleotide
cactggatagggttct

SEQ ID NO: 1567 - DNA, 16 bp, Artificial Sequence
  Synthetic oligonucleotide
ttccactggatagggt

SEQ ID NO: 1568 - DNA, 16 bp, Artificial Sequence
  Synthetic oligonucleotide
ccttccactggatagg

SEQ ID NO: 1569 - DNA, 16 bp, Artificial Sequence
  Synthetic oligonucleotide
attctccttccactgg

SEQ ID NO: 1570 - DNA, 16 bp, Artificial Sequence
  Synthetic oligonucleotide
gcactatctttattaa

SEQ ID NO: 1571 - DNA, 16 bp, Artificial Sequence
  Synthetic oligonucleotide
ctttcagcactatctt

SEQ ID NO: 1572 - DNA, 16 bp, Artificial Sequence
  Synthetic oligonucleotide
ttctttcagcactatc

SEQ ID NO: 1573 - DNA, 16 bp, Artificial Sequence
  Synthetic oligonucleotide
gaattctttcagcact

SEQ ID NO: 1574 - DNA, 16 bp, Artificial Sequence
  Synthetic oligonucleotide
cctaaggaattctttc

SEQ ID NO: 1575 - DNA, 16 bp, Artificial Sequence
  Synthetic oligonucleotide
tacctaaggaattctt

SEQ ID NO: 1576 - DNA, 16 bp, Artificial Sequence
  Synthetic oligonucleotide
attacctaaggaattc

SEQ ID NO: 1577 - DNA, 16 bp, Artificial Sequence
  Synthetic oligonucleotide
atagattacctaagga

SEQ ID NO: 1578 - DNA, 16 bp, Artificial Sequence
  Synthetic oligonucleotide
ttatagattacctaag

SEQ ID NO: 1579 - DNA, 16 bp, Artificial Sequence
  Synthetic oligonucleotide
agttatagattaccta

SEQ ID NO: 1580 - DNA, 16 bp, Artificial Sequence
  Synthetic oligonucleotide
ctagttatagattacc

SEQ ID NO: 1581 - DNA, 16 bp, Artificial Sequence
  Synthetic oligonucleotide
agtcctagttatagat

SEQ ID NO: 1582 - DNA, 16 bp, Artificial Sequence
  Synthetic oligonucleotide
agtagtcctagttata

SEQ ID NO: 1583 - DNA, 16 bp, Artificial Sequence
  Synthetic oligonucleotide
ccaggagtagtcctag

SEQ ID NO: 1584 - DNA, 16 bp, Artificial Sequence
  Synthetic oligonucleotide
accaggagtagtccta

SEQ ID NO: 1585 - DNA, 16 bp, Artificial Sequence
  Synthetic oligonucleotide
taccaggagtagtcct

SEQ ID NO: 1586 - DNA, 16 bp, Artificial Sequence
  Synthetic oligonucleotide
ttaccaggagtagtcc

SEQ ID NO: 1587 - DNA, 16 bp, Artificial Sequence
  Synthetic oligonucleotide
tgttaccaggagtagt

SEQ ID NO: 1588 - DNA, 16 bp, Artificial Sequence
  Synthetic oligonucleotide
actgttaccaggagta

SEQ ID NO: 1589 - DNA, 16 bp, Artificial Sequence
  Synthetic oligonucleotide
tattactgttaccagg

SEQ ID NO: 1590 - DNA, 16 bp, Artificial Sequence
  Synthetic oligonucleotide
gaatgtattactgtta

SEQ ID NO: 1591 - DNA, 16 bp, Artificial Sequence
  Synthetic oligonucleotide
atggaatgtattactg

SEQ ID NO: 1592 - DNA, 16 bp, Artificial Sequence
  Synthetic oligonucleotide
ggttactaaaacaatg

SEQ ID NO: 1593 - DNA, 16 bp, Artificial Sequence
  Synthetic oligonucleotide
ctggttactaaaacaa

SEQ ID NO: 1594 - DNA, 16 bp, Artificial Sequence
  Synthetic oligonucleotide
atttctggttactaaa

SEQ ID NO: 1595 - DNA, 16 bp, Artificial Sequence
  Synthetic oligonucleotide
ttgcatgaagatttct

SEQ ID NO: 1596 - DNA, 16 bp, Artificial Sequence
  Synthetic oligonucleotide
ttcattgcatgaagat

SEQ ID NO: 1597 - DNA, 16 bp, Artificial Sequence
  Synthetic oligonucleotide
ttttcattgcatgaag

SEQ ID NO: 1598 - DNA, 16 bp, Artificial Sequence
  Synthetic oligonucleotide
taagcttcatgaatta

SEQ ID NO: 1599 - DNA, 16 bp, Artificial Sequence
  Synthetic oligonucleotide
aggtttatgaggccaa

SEQ ID NO: 1600 - DNA, 16 bp, Artificial Sequence
  Synthetic oligonucleotide
aacaggtttatgaggc

SEQ ID NO: 1601 - DNA, 16 bp, Artificial Sequence
  Synthetic oligonucleotide
gttctgcaaaacaggt

SEQ ID NO: 1602 - DNA, 16 bp, Artificial Sequence
  Synthetic oligonucleotide
gagttctgcaaaacag

SEQ ID NO: 1603 - DNA, 16 bp, Artificial Sequence
  Synthetic oligonucleotide
ccttgtgcggtgactg

SEQ ID NO: 1604 - DNA, 16 bp, Artificial Sequence
  Synthetic oligonucleotide
atatacccagtgcctt

SEQ ID NO: 1605 - DNA, 16 bp, Artificial Sequence
  Synthetic oligonucleotide
ccatatacccagtgcc

SEQ ID NO: 1606 - DNA, 16 bp, Artificial Sequence
  Synthetic oligonucleotide
taccatatacccagtg

SEQ ID NO: 1607 - DNA, 16 bp, Artificial Sequence
  Synthetic oligonucleotide
cgggattatgtctctt

SEQ ID NO: 1608 - DNA, 16 bp, Artificial Sequence
  Synthetic oligonucleotide
taaggaccgggattat

SEQ ID NO: 1609 - DNA, 16 bp, Artificial Sequence
  Synthetic oligonucleotide
ctacctaaggaccggg

SEQ ID NO: 1610 - DNA, 16 bp, Artificial Sequence
  Synthetic oligonucleotide
cactacctaaggaccg

SEQ ID NO: 1611 - DNA, 16 bp, Artificial Sequence
  Synthetic oligonucleotide
cacactagcactacct

SEQ ID NO: 1612 - DNA, 16 bp, Artificial Sequence
  Synthetic oligonucleotide
accacactagcactac

SEQ ID NO: 1613 - DNA, 16 bp, Artificial Sequence
  Synthetic oligonucleotide
agaccacactagcact

SEQ ID NO: 1614 - DNA, 16 bp, Artificial Sequence
  Synthetic oligonucleotide
acagaccacactagca

SEQ ID NO: 1615 - DNA, 16 bp, Artificial Sequence
  Synthetic oligonucleotide
ttacagaccacactag

SEQ ID NO: 1616 - DNA, 16 bp, Artificial Sequence
  Synthetic oligonucleotide
agatattacagaccac

SEQ ID NO: 1617 - DNA, 16 bp, Artificial Sequence
  Synthetic oligonucleotide
tagtaagatattacag

SEQ ID NO: 1618 - DNA, 16 bp, Artificial Sequence
  Synthetic oligonucleotide
cttagtaagatattac

SEQ ID NO: 1619 - DNA, 16 bp, Artificial Sequence
  Synthetic oligonucleotide
aaggccttagtaagat

SEQ ID NO: 1620 - DNA, 16 bp, Artificial Sequence
  Synthetic oligonucleotide
caaaggccttagtaag

SEQ ID NO: 1621 - DNA, 16 bp, Artificial Sequence
  Synthetic oligonucleotide
ataccaaaggccttag

SEQ ID NO: 1622 - DNA, 16 bp, Artificial Sequence
  Synthetic oligonucleotide
gtataccaaaggcctt

SEQ ID NO: 1623 - DNA, 16 bp, Artificial Sequence
  Synthetic oligonucleotide
aaactaaaatacgcat

SEQ ID NO: 1624 - DNA, 16 bp, Artificial Sequence
  Synthetic oligonucleotide
caaaactaaaatacgc

SEQ ID NO: 1625 - DNA, 16 bp, Artificial Sequence
  Synthetic oligonucleotide
aaccccttctttgcaa

SEQ ID NO: 1626 - DNA, 16 bp, Artificial Sequence
  Synthetic oligonucleotide
agaccaaaccccttct

SEQ ID NO: 1627 - DNA, 16 bp, Artificial Sequence
  Synthetic oligonucleotide
agagaccaaacccctt

SEQ ID NO: 1628 - DNA, 16 bp, Artificial Sequence
  Synthetic oligonucleotide
acagagaccaaacccc

SEQ ID NO: 1629 - DNA, 16 bp, Artificial Sequence
  Synthetic oligonucleotide
gcttgatcgaagagtt

SEQ ID NO: 1630 - DNA, 16 bp, Artificial Sequence
  Synthetic oligonucleotide
aaagtagcttgatcga

SEQ ID NO: 1631 - DNA, 16 bp, Artificial Sequence
  Synthetic oligonucleotide
gaagtgatttacataa

SEQ ID NO: 1632 - DNA, 16 bp, Artificial Sequence
  Synthetic oligonucleotide
taatcaagtttattcc

SEQ ID NO: 1633 - DNA, 16 bp, Artificial Sequence
  Synthetic oligonucleotide
ctggaatattacacat

SEQ ID NO: 1634 - DNA, 16 bp, Artificial Sequence
  Synthetic oligonucleotide
tacatagaagtttcct

SEQ ID NO: 1635 - DNA, 16 bp, Artificial Sequence
  Synthetic oligonucleotide
gatttttacatagaag

SEQ ID NO: 1636 - DNA, 16 bp, Artificial Sequence
  Synthetic oligonucleotide
gtgttccaaagatctg

SEQ ID NO: 1637 - DNA, 16 bp, Artificial Sequence
  Synthetic oligonucleotide
gcacagagaccaaacc

SEQ ID NO: 1638 - DNA, 16 bp, Artificial Sequence
  Synthetic oligonucleotide
atagagctggcacaga

SEQ ID NO: 1639 - DNA, 16 bp, Artificial Sequence
  Synthetic oligonucleotide
aattatagagctggca

SEQ ID NO: 1640 - DNA, 16 bp, Artificial Sequence
  Synthetic oligonucleotide
acaattatagagctgg

SEQ ID NO: 1641 - DNA, 16 bp, Artificial Sequence
  Synthetic oligonucleotide
aaacaattatagagct

SEQ ID NO: 1642 - DNA, 16 bp, Artificial Sequence
  Synthetic oligonucleotide
agtttcagtggaatcg

SEQ ID NO: 1643 - DNA, 16 bp, Artificial Sequence
  Synthetic oligonucleotide
gagtttcagtggaatc

SEQ ID NO: 1644 - DNA, 16 bp, Artificial Sequence
  Synthetic oligonucleotide
atcgaagagtttcagt

SEQ ID NO: 1645 - DNA, 16 bp, Artificial Sequence
  Synthetic oligonucleotide
gatcgaagagtttcag

SEQ ID NO: 1646 - DNA, 16 bp, Artificial Sequence
  Synthetic oligonucleotide
agcttgatcgaagagt

SEQ ID NO: 1647 - DNA, 16 bp, Artificial Sequence
  Synthetic oligonucleotide
tagcttgatcgaagag

SEQ ID NO: 1648 - DNA, 16 bp, Artificial Sequence
  Synthetic oligonucleotide
gtagcttgatcgaaga

SEQ ID NO: 1649 - DNA, 16 bp, Artificial Sequence
  Synthetic oligonucleotide
agtagcttgatcgaag

SEQ ID NO: 1650 - DNA, 16 bp, Artificial Sequence
  Synthetic oligonucleotide
aagtagcttgatcgaa

SEQ ID NO: 1651 - DNA, 16 bp, Artificial Sequence
  Synthetic oligonucleotide
acataaagtagcttga

SEQ ID NO: 1652 - DNA, 16 bp, Artificial Sequence
  Synthetic oligonucleotide
ttacataaagtagctt

SEQ ID NO: 1653 - DNA, 16 bp, Artificial Sequence
  Synthetic oligonucleotide
gatttacataaagtag

SEQ ID NO: 1654 - DNA, 16 bp, Artificial Sequence
  Synthetic oligonucleotide
caatgaagtgatttac

SEQ ID NO: 1655 - DNA, 16 bp, Artificial Sequence
  Synthetic oligonucleotide
atcaagtttattcctt

SEQ ID NO: 1656 - DNA, 16 bp, Artificial Sequence
  Synthetic oligonucleotide
aatcaagtttattcct

SEQ ID NO: 1657 - DNA, 16 bp, Artificial Sequence
  Synthetic oligonucleotide
ataatcaagtttattc

SEQ ID NO: 1658 - DNA, 16 bp, Artificial Sequence
  Synthetic oligonucleotide
gtcctaaaagaatcac

SEQ ID NO: 1659 - DNA, 16 bp, Artificial Sequence
  Synthetic oligonucleotide
attgtcctaaaagaat

SEQ ID NO: 1660 - DNA, 16 bp, Artificial Sequence
  Synthetic oligonucleotide
cagtaattgtcctaaa

SEQ ID NO: 1661 - DNA, 16 bp, Artificial Sequence
  Synthetic oligonucleotide
tacagtaattgtccta

SEQ ID NO: 1662 - DNA, 16 bp, Artificial Sequence
  Synthetic oligonucleotide
gtgtacagtaattgtc

SEQ ID NO: 1663 - DNA, 16 bp, Artificial Sequence
  Synthetic oligonucleotide
taatgtgtacagtaat

SEQ ID NO: 1664 - DNA, 16 bp, Artificial Sequence
  Synthetic oligonucleotide
cttaatgtgtacagta

SEQ ID NO: 1665 - DNA, 16 bp, Artificial Sequence
  Synthetic oligonucleotide
accttaatgtgtacag

SEQ ID NO: 1666 - DNA, 16 bp, Artificial Sequence
  Synthetic oligonucleotide
acaccttaatgtgtac

SEQ ID NO: 1667 - DNA, 16 bp, Artificial Sequence
  Synthetic oligonucleotide
acatacaccttaatgt

SEQ ID NO: 1668 - DNA, 16 bp, Artificial Sequence
  Synthetic oligonucleotide
tgacatacaccttaat

SEQ ID NO: 1669 - DNA, 16 bp, Artificial Sequence
  Synthetic oligonucleotide
tctgacatacacctta

SEQ ID NO: 1670 - DNA, 16 bp, Artificial Sequence
  Synthetic oligonucleotide
tatctgacatacacct

SEQ ID NO: 1671 - DNA, 16 bp, Artificial Sequence
  Synthetic oligonucleotide
aatatctgacatacac

SEQ ID NO: 1672 - DNA, 16 bp, Artificial Sequence
  Synthetic oligonucleotide
gtcaatatgaatatct

SEQ ID NO: 1673 - DNA, 16 bp, Artificial Sequence
  Synthetic oligonucleotide
atttgggtcaatatga

SEQ ID NO: 1674 - DNA, 16 bp, Artificial Sequence
  Synthetic oligonucleotide
acacatttgggtcaat

SEQ ID NO: 1675 - DNA, 16 bp, Artificial Sequence
  Synthetic oligonucleotide
ttacacatttgggtca

SEQ ID NO: 1676 - DNA, 16 bp, Artificial Sequence
  Synthetic oligonucleotide
acccagataaaactat

SEQ ID NO: 1677 - DNA, 16 bp, Artificial Sequence
  Synthetic oligonucleotide
gtacccagataaaact

SEQ ID NO: 1678 - DNA, 16 bp, Artificial Sequence
  Synthetic oligonucleotide
atttgtacccagataa

SEQ ID NO: 1679 - DNA, 16 bp, Artificial Sequence
  Synthetic oligonucleotide
ttatttgtacccagat

SEQ ID NO: 1680 - DNA, 16 bp, Artificial Sequence
  Synthetic oligonucleotide
gtttatttgtacccag

SEQ ID NO: 1681 - DNA, 16 bp, Artificial Sequence
  Synthetic oligonucleotide
aggcacctgtttattt

SEQ ID NO: 1682 - DNA, 16 bp, Artificial Sequence
  Synthetic oligonucleotide
gttcaggcacctgttt

SEQ ID NO: 1683 - DNA, 16 bp, Artificial Sequence
  Synthetic oligonucleotide
aactagttcaggcacc

SEQ ID NO: 1684 - DNA, 16 bp, Artificial Sequence
  Synthetic oligonucleotide
ttgtctgtgaactagt

SEQ ID NO: 1685 - DNA, 16 bp, Artificial Sequence
  Synthetic oligonucleotide
ccttgtctgtgaacta

SEQ ID NO: 1686 - DNA, 16 bp, Artificial Sequence
  Synthetic oligonucleotide
tagaagtttccttgtc

SEQ ID NO: 1687 - DNA, 16 bp, Artificial Sequence
  Synthetic oligonucleotide
catagaagtttccttg

SEQ ID NO: 1688 - DNA, 16 bp, Artificial Sequence
  Synthetic oligonucleotide
cagaaatcatagtgat

SEQ ID NO: 1689 - DNA, 16 bp, Artificial Sequence
  Synthetic oligonucleotide
cacatagcaattcaga

SEQ ID NO: 1690 - DNA, 16 bp, Artificial Sequence
  Synthetic oligonucleotide
agatctgtagtttcac

SEQ ID NO: 1691 - DNA, 16 bp, Artificial Sequence
  Synthetic oligonucleotide
aaagatctgtagtttc

SEQ ID NO: 1692 - DNA, 16 bp, Artificial Sequence
  Synthetic oligonucleotide
ccaaagatctgtagtt

SEQ ID NO: 1693 - DNA, 16 bp, Artificial Sequence
  Synthetic oligonucleotide
cagtgttccaaagatc

SEQ ID NO: 1694 - DNA, 16 bp, Artificial Sequence
  Synthetic oligonucleotide
accctacctaaacagt

SEQ ID NO: 1695 - DNA, 16 bp, Artificial Sequence
  Synthetic oligonucleotide
ttaacaccctacctaa

SEQ ID NO: 1696 - DNA, 16 bp, Artificial Sequence
  Synthetic oligonucleotide
tcttaacaccctacct

SEQ ID NO: 1697 - DNA, 16 bp, Artificial Sequence
  Synthetic oligonucleotide
gtgtaagtcttaacac

SEQ ID NO: 1698 - DNA, 16 bp, Artificial Sequence
  Synthetic oligonucleotide
gtactgtgtaagtctt

SEQ ID NO: 1699 - DNA, 16 bp, Artificial Sequence
  Synthetic oligonucleotide
tagaaacgaggtactg

SEQ ID NO: 1700 - DNA, 16 bp, Artificial Sequence
  Synthetic oligonucleotide
gtgtagaaacgaggta

SEQ ID NO: 1701 - DNA, 16 bp, Artificial Sequence
  Synthetic oligonucleotide
aattcaagaggcctaa

SEQ ID NO: 1702 - DNA, 16 bp, Artificial Sequence
  Synthetic oligonucleotide
ttctagaattctcccc

SEQ ID NO: 1703 - DNA, 16 bp, Artificial Sequence
  Synthetic oligonucleotide
aacttcaacaaggatt

SEQ ID NO: 1704 - DNA, 16 bp, Artificial Sequence
  Synthetic oligonucleotide
gaacattcactcaaat

SEQ ID NO: 1705 - DNA, 16 bp, Artificial Sequence
  Synthetic oligonucleotide
gcctagaatgcctact

SEQ ID NO: 1706 - DNA, 16 bp, Artificial Sequence
  Synthetic oligonucleotide
tgtgactcagttaaat

SEQ ID NO: 1707 - DNA, 16 bp, Artificial Sequence
  Synthetic oligonucleotide
agttaggttctaaatt

SEQ ID NO: 1708 - DNA, 16 bp, Artificial Sequence
  Synthetic oligonucleotide
tataaaagttaggttc

SEQ ID NO: 1709 - DNA, 16 bp, Artificial Sequence
  Synthetic oligonucleotide
aacatgttaatgccta

SEQ ID NO: 1710 - DNA, 16 bp, Artificial Sequence
  Synthetic oligonucleotide
tctctgtgtagaaacg

SEQ ID NO: 1711 - DNA, 16 bp, Artificial Sequence
  Synthetic oligonucleotide
agttcctgaagtatgg

SEQ ID NO: 1712 - DNA, 16 bp, Artificial Sequence
  Synthetic oligonucleotide
aagcactgcagttcct

SEQ ID NO: 1713 - DNA, 16 bp, Artificial Sequence
  Synthetic oligonucleotide
ctcataagcactgcag

SEQ ID NO: 1714 - DNA, 16 bp, Artificial Sequence
  Synthetic oligonucleotide
ccctcataagcactgc

SEQ ID NO: 1715 - DNA, 16 bp, Artificial Sequence
  Synthetic oligonucleotide
atatcccctcataagc

SEQ ID NO: 1716 - DNA, 16 bp, Artificial Sequence
  Synthetic oligonucleotide
cctaaatatcccctca

SEQ ID NO: 1717 - DNA, 16 bp, Artificial Sequence
  Synthetic oligonucleotide
ggcctaaatatcccct

SEQ ID NO: 1718 - DNA, 16 bp, Artificial Sequence
  Synthetic oligonucleotide
ttcaagaggcctaaat

SEQ ID NO: 1719 - DNA, 16 bp, Artificial Sequence
  Synthetic oligonucleotide
gcccatctacatcaaa

SEQ ID NO: 1720 - DNA, 16 bp, Artificial Sequence
  Synthetic oligonucleotide
aaatgcccatctacat

SEQ ID NO: 1721 - DNA, 16 bp, Artificial Sequence
  Synthetic oligonucleotide
taaccactaccttaaa

SEQ ID NO: 1722 - DNA, 16 bp, Artificial Sequence
  Synthetic oligonucleotide
attaaccactacctta

SEQ ID NO: 1723 - DNA, 16 bp, Artificial Sequence
  Synthetic oligonucleotide
ggtaattaaccactac

SEQ ID NO: 1724 - DNA, 16 bp, Artificial Sequence
  Synthetic oligonucleotide
ataaaggtaattaacc

SEQ ID NO: 1725 - DNA, 16 bp, Artificial Sequence
  Synthetic oligonucleotide
aagttcacataaaggt

SEQ ID NO: 1726 - DNA, 16 bp, Artificial Sequence
  Synthetic oligonucleotide
aaaccattcaaagttc

SEQ ID NO: 1727 - DNA, 16 bp, Artificial Sequence
  Synthetic oligonucleotide
ttgttaaaccattcaa

SEQ ID NO: 1728 - DNA, 16 bp, Artificial Sequence
  Synthetic oligonucleotide
ccccctttaaaatctc

SEQ ID NO: 1729 - DNA, 16 bp, Artificial Sequence
  Synthetic oligonucleotide
tagaattctccccctt

SEQ ID NO: 1730 - DNA, 16 bp, Artificial Sequence
  Synthetic oligonucleotide
gtaataattaggtaac

SEQ ID NO: 1731 - DNA, 16 bp, Artificial Sequence
  Synthetic oligonucleotide
aggctgtaataattag

SEQ ID NO: 1732 - DNA, 16 bp, Artificial Sequence
  Synthetic oligonucleotide
taaggctgtaataatt

SEQ ID NO: 1733 - DNA, 16 bp, Artificial Sequence
  Synthetic oligonucleotide
ctttaaggctgtaata

SEQ ID NO: 1734 - DNA, 16 bp, Artificial Sequence
  Synthetic oligonucleotide
tcaacaaggatttttg

SEQ ID NO: 1735 - DNA, 16 bp, Artificial Sequence
  Synthetic oligonucleotide
cttcaacaaggatttt

SEQ ID NO: 1736 - DNA, 16 bp, Artificial Sequence
  Synthetic oligonucleotide
agtctatgtaatttag

SEQ ID NO: 1737 - DNA, 16 bp, Artificial Sequence
  Synthetic oligonucleotide
gcctaagtctatgtaa

SEQ ID NO: 1738 - DNA, 16 bp, Artificial Sequence
  Synthetic oligonucleotide
atgcctaagtctatgt

SEQ ID NO: 1739 - DNA, 16 bp, Artificial Sequence
  Synthetic oligonucleotide
taatgcctaagtctat

SEQ ID NO: 1740 - DNA, 16 bp, Artificial Sequence
  Synthetic oligonucleotide
catgttaatgcctaag

SEQ ID NO: 1741 - DNA, 16 bp, Artificial Sequence
  Synthetic oligonucleotide
caaacatgttaatgcc

SEQ ID NO: 1742 - DNA, 16 bp, Artificial Sequence
  Synthetic oligonucleotide
tgctatattcttccac

SEQ ID NO: 1743 - DNA, 16 bp, Artificial Sequence
  Synthetic oligonucleotide
tcactcaaatgataca

SEQ ID NO: 1744 - DNA, 16 bp, Artificial Sequence
  Synthetic oligonucleotide
cattcactcaaatgat

SEQ ID NO: 1745 - DNA, 16 bp, Artificial Sequence
  Synthetic oligonucleotide
gggaacattcactcaa

SEQ ID NO: 1746 - DNA, 16 bp, Artificial Sequence
  Synthetic oligonucleotide
cctacttgggaacatt

SEQ ID NO: 1747 - DNA, 16 bp, Artificial Sequence
  Synthetic oligonucleotide
tgcctacttgggaaca

SEQ ID NO: 1748 - DNA, 16 bp, Artificial Sequence
  Synthetic oligonucleotide
gagcctagaatgccta

SEQ ID NO: 1749 - DNA, 16 bp, Artificial Sequence
  Synthetic oligonucleotide
atagagcctagaatgc

SEQ ID NO: 1750 - DNA, 16 bp, Artificial Sequence
  Synthetic oligonucleotide
aaatagagcctagaat

SEQ ID NO: 1751 - DNA, 16 bp, Artificial Sequence
  Synthetic oligonucleotide
agttaaatagagccta

SEQ ID NO: 1752 - DNA, 16 bp, Artificial Sequence
  Synthetic oligonucleotide
gactcagttaaataga

SEQ ID NO: 1753 - DNA, 16 bp, Artificial Sequence
  Synthetic oligonucleotide
tgactcagttaaatag

SEQ ID NO: 1754 - DNA, 16 bp, Artificial Sequence
  Synthetic oligonucleotide
gtgtgactcagttaaa

SEQ ID NO: 1755 - DNA, 16 bp, Artificial Sequence
  Synthetic oligonucleotide
ttctaaattcctatgc

SEQ ID NO: 1756 - DNA, 16 bp, Artificial Sequence
  Synthetic oligonucleotide
aggttctaaattccta

SEQ ID NO: 1757 - DNA, 16 bp, Artificial Sequence
  Synthetic oligonucleotide
taaaagttaggttcta

SEQ ID NO: 1758 - DNA, 16 bp, Artificial Sequence
  Synthetic oligonucleotide
tgataacctataaaag

SEQ ID NO: 1759 - DNA, 16 bp, Artificial Sequence
  Synthetic oligonucleotide
gttttgataacctata

SEQ ID NO: 1760 - DNA, 16 bp, Artificial Sequence
  Synthetic oligonucleotide
caacagttttgataac

SEQ ID NO: 1761 - DNA, 16 bp, Artificial Sequence
  Synthetic oligonucleotide
gacaacagttttgata

SEQ ID NO: 1762 - DNA, 16 bp, Artificial Sequence
  Synthetic oligonucleotide
gtgacaacagttttga

SEQ ID NO: 1763 - DNA, 16 bp, Artificial Sequence
  Synthetic oligonucleotide
gcaatggtgacaacag

SEQ ID NO: 1764 - DNA, 16 bp, Artificial Sequence
  Synthetic oligonucleotide
atgtatatattaggac

SEQ ID NO: 1765 - DNA, 16 bp, Artificial Sequence
  Synthetic oligonucleotide
ctatgtatatattagg

SEQ ID NO: 1766 - DNA, 16 bp, Artificial Sequence
  Synthetic oligonucleotide
cccacaaagtttctat

SEQ ID NO: 1767 - DNA, 16 bp, Artificial Sequence
  Synthetic oligonucleotide
gccccacaaagtttct

SEQ ID NO: 1768 - DNA, 16 bp, Artificial Sequence
  Synthetic oligonucleotide
ttaacatgccccacaa

SEQ ID NO: 1769 - DNA, 16 bp, Artificial Sequence
  Synthetic oligonucleotide
acttaacatgccccac

SEQ ID NO: 1770 - DNA, 16 bp, Artificial Sequence
  Synthetic oligonucleotide
taacttaacatgcccc

SEQ ID NO: 1771 - DNA, 16 bp, Artificial Sequence
  Synthetic oligonucleotide
aactgtaacttaacat

SEQ ID NO: 1772 - DNA, 16 bp, Artificial Sequence
  Synthetic oligonucleotide
tgcaaactgtaactta

SEQ ID NO: 1773 - DNA, 16 bp, Artificial Sequence
  Synthetic oligonucleotide
cagatagtttttgctg

SEQ ID NO: 1774 - DNA, 16 bp, Artificial Sequence
  Synthetic oligonucleotide
aatcttcagatagttt

SEQ ID NO: 1775 - DNA, 16 bp, Artificial Sequence
  Synthetic oligonucleotide
ggttctaaaaaacatt

SEQ ID NO: 1776 - DNA, 16 bp, Artificial Sequence
  Synthetic oligonucleotide
gctttaaggtaactgc

SEQ ID NO: 1777 - DNA, 16 bp, Artificial Sequence
  Synthetic oligonucleotide
aaattcagctttaagg

SEQ ID NO: 1778 - DNA, 16 bp, Artificial Sequence
  Synthetic oligonucleotide
aagaactcatgtgagt

SEQ ID NO: 1779 - DNA, 16 bp, Artificial Sequence
  Synthetic oligonucleotide
tatgactattcttcaa

SEQ ID NO: 1780 - DNA, 16 bp, Artificial Sequence
  Synthetic oligonucleotide
catctaaattacctat

SEQ ID NO: 1781 - DNA, 16 bp, Artificial Sequence
  Synthetic oligonucleotide
ttggaaactttcggat

SEQ ID NO: 1782 - DNA, 16 bp, Artificial Sequence
  Synthetic oligonucleotide
tgcagaattcatgcta

SEQ ID NO: 1783 - DNA, 16 bp, Artificial Sequence
  Synthetic oligonucleotide
caaactgtaacttaac

SEQ ID NO: 1784 - DNA, 16 bp, Artificial Sequence
  Synthetic oligonucleotide
caaatgagatgaactt

SEQ ID NO: 1785 - DNA, 16 bp, Artificial Sequence
  Synthetic oligonucleotide
tacaaatgagatgaac

SEQ ID NO: 1786 - DNA, 16 bp, Artificial Sequence
  Synthetic oligonucleotide
atatactgtttgaaga

SEQ ID NO: 1787 - DNA, 16 bp, Artificial Sequence
  Synthetic oligonucleotide
atcccctaaaaaaagt

SEQ ID NO: 1788 - DNA, 16 bp, Artificial Sequence
  Synthetic oligonucleotide
tagtttttgctgtcta

SEQ ID NO: 1789 - DNA, 16 bp, Artificial Sequence
  Synthetic oligonucleotide
gatagtttttgctgtc

SEQ ID NO: 1790 - DNA, 16 bp, Artificial Sequence
  Synthetic oligonucleotide
gaaatcttcagatagt

SEQ ID NO: 1791 - DNA, 16 bp, Artificial Sequence
  Synthetic oligonucleotide
tggaaatcttcagata

SEQ ID NO: 1792 - DNA, 16 bp, Artificial Sequence
  Synthetic oligonucleotide
caattatcaagaaatc

SEQ ID NO: 1793 - DNA, 16 bp, Artificial Sequence
  Synthetic oligonucleotide
ctacacaattatcaag

SEQ ID NO: 1794 - DNA, 16 bp, Artificial Sequence
  Synthetic oligonucleotide
cattactacacaatta

SEQ ID NO: 1795 - DNA, 16 bp, Artificial Sequence
  Synthetic oligonucleotide
aacattactacacaat

SEQ ID NO: 1796 - DNA, 16 bp, Artificial Sequence
  Synthetic oligonucleotide
cagctttaaggtaact

SEQ ID NO: 1797 - DNA, 16 bp, Artificial Sequence
  Synthetic oligonucleotide
attcagctttaaggta

SEQ ID NO: 1798 - DNA, 16 bp, Artificial Sequence
  Synthetic oligonucleotide
catgctatccagtatt

SEQ ID NO: 1799 - DNA, 16 bp, Artificial Sequence
  Synthetic oligonucleotide
attcatgctatccagt

SEQ ID NO: 1800 - DNA, 16 bp, Artificial Sequence
  Synthetic oligonucleotide
gaattcatgctatcca

SEQ ID NO: 1801 - DNA, 16 bp, Artificial Sequence
  Synthetic oligonucleotide
aatgcagaattcatgc

SEQ ID NO: 1802 - DNA, 16 bp, Artificial Sequence
  Synthetic oligonucleotide
ttatgacagctattca

SEQ ID NO: 1803 - DNA, 16 bp, Artificial Sequence
  Synthetic oligonucleotide
atgtgagtatctttct

SEQ ID NO: 1804 - DNA, 16 bp, Artificial Sequence
  Synthetic oligonucleotide
ctcatgtgagtatctt

SEQ ID NO: 1805 - DNA, 16 bp, Artificial Sequence
  Synthetic oligonucleotide
tcaagaactcatgtga

SEQ ID NO: 1806 - DNA, 16 bp, Artificial Sequence
  Synthetic oligonucleotide
cttcaagaactcatgt

SEQ ID NO: 1807 - DNA, 16 bp, Artificial Sequence
  Synthetic oligonucleotide
tattcttcaagaactc

SEQ ID NO: 1808 - DNA, 16 bp, Artificial Sequence
  Synthetic oligonucleotide
actattcttcaagaac

SEQ ID NO: 1809 - DNA, 16 bp, Artificial Sequence
  Synthetic oligonucleotide
tgactattcttcaaga

SEQ ID NO: 1810 - DNA, 16 bp, Artificial Sequence
  Synthetic oligonucleotide
ctagttatgactattc

SEQ ID NO: 1811 - DNA, 16 bp, Artificial Sequence
  Synthetic oligonucleotide
atctagttatgactat

SEQ ID NO: 1812 - DNA, 16 bp, Artificial Sequence
  Synthetic oligonucleotide
taatctagttatgact

SEQ ID NO: 1813 - DNA, 16 bp, Artificial Sequence
  Synthetic oligonucleotide
gatcttaatctagtta

SEQ ID NO: 1814 - DNA, 16 bp, Artificial Sequence
  Synthetic oligonucleotide
cagatcttaatctagt

SEQ ID NO: 1815 - DNA, 16 bp, Artificial Sequence
  Synthetic oligonucleotide
cacagatcttaatcta

SEQ ID NO: 1816 - DNA, 16 bp, Artificial Sequence
  Synthetic oligonucleotide
aggcacttcaaactat

SEQ ID NO: 1817 - DNA, 16 bp, Artificial Sequence
  Synthetic oligonucleotide
aacaggcacttcaaac

SEQ ID NO: 1818 - DNA, 16 bp, Artificial Sequence
  Synthetic oligonucleotide
caaacaggcacttcaa

SEQ ID NO: 1819 - DNA, 16 bp, Artificial Sequence
  Synthetic oligonucleotide
atcccaaacaggcact

SEQ ID NO: 1820 - DNA, 16 bp, Artificial Sequence
  Synthetic oligonucleotide
attatcccaaacaggc

SEQ ID NO: 1821 - DNA, 16 bp, Artificial Sequence
  Synthetic oligonucleotide
acctatcattatccca

SEQ ID NO: 1822 - DNA, 16 bp, Artificial Sequence
  Synthetic oligonucleotide
attacctatcattatc

SEQ ID NO: 1823 - DNA, 16 bp, Artificial Sequence
  Synthetic oligonucleotide
tctaaattacctatca

SEQ ID NO: 1824 - DNA, 16 bp, Artificial Sequence
  Synthetic oligonucleotide
attcatctaaattacc

SEQ ID NO: 1825 - DNA, 16 bp, Artificial Sequence
  Synthetic oligonucleotide
cccctaaattcatcta

SEQ ID NO: 1826 - DNA, 16 bp, Artificial Sequence
  Synthetic oligonucleotide
tatctgcagataactt

SEQ ID NO: 1827 - DNA, 16 bp, Artificial Sequence
  Synthetic oligonucleotide
catatctgcagataac

SEQ ID NO: 1828 - DNA, 16 bp, Artificial Sequence
  Synthetic oligonucleotide
aacatatctgcagata

SEQ ID NO: 1829 - DNA, 16 bp, Artificial Sequence
  Synthetic oligonucleotide
ccctcaacatatctgc

SEQ ID NO: 1830 - DNA, 16 bp, Artificial Sequence
  Synthetic oligonucleotide
cagttagctctgtggg

SEQ ID NO: 1831 - DNA, 16 bp, Artificial Sequence
  Synthetic oligonucleotide
cactgtaacccagtta

SEQ ID NO: 1832 - DNA, 16 bp, Artificial Sequence
  Synthetic oligonucleotide
aacactgtaacccagt

SEQ ID NO: 1833 - DNA, 16 bp, Artificial Sequence
  Synthetic oligonucleotide
aaaacactgtaaccca

SEQ ID NO: 1834 - DNA, 16 bp, Artificial Sequence
  Synthetic oligonucleotide
tcggataaaacactgt

SEQ ID NO: 1835 - DNA, 16 bp, Artificial Sequence
  Synthetic oligonucleotide
tttcggataaaacact

SEQ ID NO: 1836 - DNA, 16 bp, Artificial Sequence
  Synthetic oligonucleotide
aaactttcggataaaa

SEQ ID NO: 1837 - DNA, 16 bp, Artificial Sequence
  Synthetic oligonucleotide
ggaaactttcggataa

SEQ ID NO: 1838 - DNA, 16 bp, Artificial Sequence
  Synthetic oligonucleotide
tggaattggaaacttt

SEQ ID NO: 1839 - DNA, 16 bp, Artificial Sequence
  Synthetic oligonucleotide
agtggaattggaaact

SEQ ID NO: 1840 - DNA, 16 bp, Artificial Sequence
  Synthetic oligonucleotide
acaagacagtggaatt

SEQ ID NO: 1841 - DNA, 16 bp, Artificial Sequence
  Synthetic oligonucleotide
aaacacaagacagtgg

SEQ ID NO: 1842 - DNA, 16 bp, Artificial Sequence
  Synthetic oligonucleotide
attggcactcaaagga

SEQ ID NO: 1843 - DNA, 16 bp, Artificial Sequence
  Synthetic oligonucleotide
aaattggcactcaaag

SEQ ID NO: 1844 - DNA, 16 bp, Artificial Sequence
  Synthetic oligonucleotide
gtttacactatacaaa

SEQ ID NO: 1845 - DNA, 16 bp, Artificial Sequence
  Synthetic oligonucleotide
gtttcagtttacacta

SEQ ID NO: 1846 - DNA, 16 bp, Artificial Sequence
  Synthetic oligonucleotide
gtacaaaatgtgcatg

SEQ ID NO: 1847 - DNA, 16 bp, Artificial Sequence
  Synthetic oligonucleotide
ggaaaacaactggatc

SEQ ID NO: 1848 - DNA, 16 bp, Artificial Sequence
  Synthetic oligonucleotide
ttgatatgaccaacat

SEQ ID NO: 1849 - DNA, 16 bp, Artificial Sequence
  Synthetic oligonucleotide
caatctgtattgtcgg

SEQ ID NO: 1850 - DNA, 16 bp, Artificial Sequence
  Synthetic oligonucleotide
agtctatttcaggcgg

SEQ ID NO: 1851 - DNA, 16 bp, Artificial Sequence
  Synthetic oligonucleotide
gaaagcacaatgtaca

SEQ ID NO: 1852 - DNA, 16 bp, Artificial Sequence
  Synthetic oligonucleotide
cactgcatatgtccca

SEQ ID NO: 1853 - DNA, 16 bp, Artificial Sequence
  Synthetic oligonucleotide
ctggatcacactgcat

SEQ ID NO: 1854 - DNA, 16 bp, Artificial Sequence
  Synthetic oligonucleotide
ggtcagcgcaaccaaa

SEQ ID NO: 1855 - DNA, 16 bp, Artificial Sequence
  Synthetic oligonucleotide
taatgtttgatatgac

SEQ ID NO: 1856 - DNA, 16 bp, Artificial Sequence
  Synthetic oligonucleotide
tagtaagaaattggca

SEQ ID NO: 1857 - DNA, 16 bp, Artificial Sequence
  Synthetic oligonucleotide
agtactagtaagaaat

SEQ ID NO: 1858 - DNA, 16 bp, Artificial Sequence
  Synthetic oligonucleotide
atagtactagtaagaa

SEQ ID NO: 1859 - DNA, 16 bp, Artificial Sequence
  Synthetic oligonucleotide
aaatagtactagtaag

SEQ ID NO: 1860 - DNA, 16 bp, Artificial Sequence
  Synthetic oligonucleotide
cattaagaaatagtac

SEQ ID NO: 1861 - DNA, 16 bp, Artificial Sequence
  Synthetic oligonucleotide
ccaggtaaacatgtta

SEQ ID NO: 1862 - DNA, 16 bp, Artificial Sequence
  Synthetic oligonucleotide
ttccaggtaaacatgt

SEQ ID NO: 1863 - DNA, 16 bp, Artificial Sequence
  Synthetic oligonucleotide
cattccaggtaaacat

SEQ ID NO: 1864 - DNA, 16 bp, Artificial Sequence
  Synthetic oligonucleotide
cagtttacactataca

SEQ ID NO: 1865 - DNA, 16 bp, Artificial Sequence
  Synthetic oligonucleotide
atgtttcagtttacac

SEQ ID NO: 1866 - DNA, 16 bp, Artificial Sequence
  Synthetic oligonucleotide
gtgcatgtttcagttt

SEQ ID NO: 1867 - DNA, 16 bp, Artificial Sequence
  Synthetic oligonucleotide
tatgtcccacaaaaga

SEQ ID NO: 1868 - DNA, 16 bp, Artificial Sequence
  Synthetic oligonucleotide
gcatatgtcccacaaa

SEQ ID NO: 1869 - DNA, 16 bp, Artificial Sequence
  Synthetic oligonucleotide
ctgcatatgtcccaca

SEQ ID NO: 1870 - DNA, 16 bp, Artificial Sequence
  Synthetic oligonucleotide
aacaactggatcacac

SEQ ID NO: 1871 - DNA, 16 bp, Artificial Sequence
  Synthetic oligonucleotide
aaaacaactggatcac

SEQ ID NO: 1872 - DNA, 16 bp, Artificial Sequence
  Synthetic oligonucleotide
caaccaaatgatggaa

SEQ ID NO: 1873 - DNA, 16 bp, Artificial Sequence
  Synthetic oligonucleotide
tcctaggtcagcgcaa

SEQ ID NO: 1874 - DNA, 16 bp, Artificial Sequence
  Synthetic oligonucleotide
attcctaggtcagcgc

SEQ ID NO: 1875 - DNA, 16 bp, Artificial Sequence
  Synthetic oligonucleotide
caacattcctaggtca

SEQ ID NO: 1876 - DNA, 16 bp, Artificial Sequence
  Synthetic oligonucleotide
tatgaccaacattcct

SEQ ID NO: 1877 - DNA, 16 bp, Artificial Sequence
  Synthetic oligonucleotide
gatatgaccaacattc

SEQ ID NO: 1878 - DNA, 16 bp, Artificial Sequence
  Synthetic oligonucleotide
atgtttgatatgacca

SEQ ID NO: 1879 - DNA, 16 bp, Artificial Sequence
  Synthetic oligonucleotide
attaaaagagtggtca

SEQ ID NO: 1880 - DNA, 16 bp, Artificial Sequence
  Synthetic oligonucleotide
caattaaaagagtggt

SEQ ID NO: 1881 - DNA, 16 bp, Artificial Sequence
  Synthetic oligonucleotide
gcacatactcctataa

SEQ ID NO: 1882 - DNA, 16 bp, Artificial Sequence
  Synthetic oligonucleotide
cttcacagcacatact

SEQ ID NO: 1883 - DNA, 16 bp, Artificial Sequence
  Synthetic oligonucleotide
cacttcacagcacata

SEQ ID NO: 1884 - DNA, 16 bp, Artificial Sequence
  Synthetic oligonucleotide
ttagatcacttcacag

SEQ ID NO: 1885 - DNA, 16 bp, Artificial Sequence
  Synthetic oligonucleotide
ttttagatcacttcac

SEQ ID NO: 1886 - DNA, 16 bp, Artificial Sequence
  Synthetic oligonucleotide
gtacagttcatgacaa

SEQ ID NO: 1887 - DNA, 16 bp, Artificial Sequence
  Synthetic oligonucleotide
gtagtacagttcatga

SEQ ID NO: 1888 - DNA, 16 bp, Artificial Sequence
  Synthetic oligonucleotide
gagtagtacagttcat

SEQ ID NO: 1889 - DNA, 16 bp, Artificial Sequence
  Synthetic oligonucleotide
attaggagtagtacag

SEQ ID NO: 1890 - DNA, 16 bp, Artificial Sequence
  Synthetic oligonucleotide
taattaggagtagtac

SEQ ID NO: 1891 - DNA, 16 bp, Artificial Sequence
  Synthetic oligonucleotide
aataattaggagtagt

SEQ ID NO: 1892 - DNA, 16 bp, Artificial Sequence
  Synthetic oligonucleotide
cattacaataattagg

SEQ ID NO: 1893 - DNA, 16 bp, Artificial Sequence
  Synthetic oligonucleotide
gtcactgtaactattt

SEQ ID NO: 1894 - DNA, 16 bp, Artificial Sequence
  Synthetic oligonucleotide
ctcaccaatgtataaa

SEQ ID NO: 1895 - DNA, 16 bp, Artificial Sequence
  Synthetic oligonucleotide
gatctccctcaccaat

SEQ ID NO: 1896 - DNA, 16 bp, Artificial Sequence
  Synthetic oligonucleotide
attgtcggatctccct

SEQ ID NO: 1897 - DNA, 16 bp, Artificial Sequence
  Synthetic oligonucleotide
atctgtattgtcggat

SEQ ID NO: 1898 - DNA, 16 bp, Artificial Sequence
  Synthetic oligonucleotide
ttcaatctgtattgtc

SEQ ID NO: 1899 - DNA, 16 bp, Artificial Sequence
  Synthetic oligonucleotide
ccaggagtcttttctt

SEQ ID NO: 1900 - DNA, 16 bp, Artificial Sequence
  Synthetic oligonucleotide
cacagccaggagtctt

SEQ ID NO: 1901 - DNA, 16 bp, Artificial Sequence
  Synthetic oligonucleotide
attttcacacagccag

SEQ ID NO: 1902 - DNA, 16 bp, Artificial Sequence
  Synthetic oligonucleotide
taattttcacacagcc

SEQ ID NO: 1903 - DNA, 16 bp, Artificial Sequence
  Synthetic oligonucleotide
gattacattataatgc

SEQ ID NO: 1904 - DNA, 16 bp, Artificial Sequence
  Synthetic oligonucleotide
ccagattacattataa

SEQ ID NO: 1905 - DNA, 16 bp, Artificial Sequence
  Synthetic oligonucleotide
acacccagattacatt

SEQ ID NO: 1906 - DNA, 16 bp, Artificial Sequence
  Synthetic oligonucleotide
catcaacacccagatt

SEQ ID NO: 1907 - DNA, 16 bp, Artificial Sequence
  Synthetic oligonucleotide
atcatcaacacccaga

SEQ ID NO: 1908 - DNA, 16 bp, Artificial Sequence
  Synthetic oligonucleotide
cggcaaagagggtcgg

SEQ ID NO: 1909 - DNA, 16 bp, Artificial Sequence
  Synthetic oligonucleotide
aacctccaccgcaccc

SEQ ID NO: 1910 - DNA, 16 bp, Artificial Sequence
  Synthetic oligonucleotide
accactatccgtccag

SEQ ID NO: 1911 - DNA, 16 bp, Artificial Sequence
  Synthetic oligonucleotide
ccaaacacaataacct

SEQ ID NO: 1912 - DNA, 16 bp, Artificial Sequence
  Synthetic oligonucleotide
caactagcaaggaaaa

SEQ ID NO: 1913 - DNA, 16 bp, Artificial Sequence
  Synthetic oligonucleotide
agtataaaagagacga

SEQ ID NO: 1914 - DNA, 16 bp, Artificial Sequence
  Synthetic oligonucleotide
gttaattctgagctga

SEQ ID NO: 1915 - DNA, 16 bp, Artificial Sequence
  Synthetic oligonucleotide
cattttggacctcagt

SEQ ID NO: 1916 - DNA, 16 bp, Artificial Sequence
  Synthetic oligonucleotide
agcattttggacctca

SEQ ID NO: 1917 - DNA, 16 bp, Artificial Sequence
  Synthetic oligonucleotide
atggctacagtctcaa

SEQ ID NO: 1918 - DNA, 16 bp, Artificial Sequence
  Synthetic oligonucleotide
caaatatactgtggat

SEQ ID NO: 1919 - DNA, 16 bp, Artificial Sequence
  Synthetic oligonucleotide
taatttgttctctggg

SEQ ID NO: 1920 - DNA, 16 bp, Artificial Sequence
  Synthetic oligonucleotide
gaactgcaactataag

SEQ ID NO: 1921 - DNA, 16 bp, Artificial Sequence
  Synthetic oligonucleotide
agagaactgcaactat

SEQ ID NO: 1922 - DNA, 16 bp, Artificial Sequence
  Synthetic oligonucleotide
atctctaaagagcaat

SEQ ID NO: 1923 - DNA, 16 bp, Artificial Sequence
  Synthetic oligonucleotide
caatactcaagattct

SEQ ID NO: 1924 - DNA, 16 bp, Artificial Sequence
  Synthetic oligonucleotide
caactctattattcaa

SEQ ID NO: 1925 - DNA, 16 bp, Artificial Sequence
  Synthetic oligonucleotide
cttaaaattaactacc

SEQ ID NO: 1926 - DNA, 16 bp, Artificial Sequence
  Synthetic oligonucleotide
caggtacagaattcta

SEQ ID NO: 1927 - DNA, 16 bp, Artificial Sequence
  Synthetic oligonucleotide
aacctgtatatacatg

SEQ ID NO: 1928 - DNA, 16 bp, Artificial Sequence
  Synthetic oligonucleotide
gaaccagttaagtatc

SEQ ID NO: 1929 - DNA, 16 bp, Artificial Sequence
  Synthetic oligonucleotide
ggatttttggacgagg

SEQ ID NO: 1930 - DNA, 16 bp, Artificial Sequence
  Synthetic oligonucleotide
ataggttgagcattaa

SEQ ID NO: 1931 - DNA, 16 bp, Artificial Sequence
  Synthetic oligonucleotide
tttcatataggttgag

SEQ ID NO: 1932 - DNA, 16 bp, Artificial Sequence
  Synthetic oligonucleotide
aaatctttgtgcattg

SEQ ID NO: 1933 - DNA, 16 bp, Artificial Sequence
  Synthetic oligonucleotide
ttattacagtgcacct

SEQ ID NO: 1934 - DNA, 16 bp, Artificial Sequence
  Synthetic oligonucleotide
ctggattattacagtg

SEQ ID NO: 1935 - DNA, 16 bp, Artificial Sequence
  Synthetic oligonucleotide
acagtctggattatta

SEQ ID NO: 1936 - DNA, 16 bp, Artificial Sequence
  Synthetic oligonucleotide
acacagtctggattat

SEQ ID NO: 1937 - DNA, 16 bp, Artificial Sequence
  Synthetic oligonucleotide
aaacacagtctggatt

SEQ ID NO: 1938 - DNA, 16 bp, Artificial Sequence
  Synthetic oligonucleotide
acctataatggtgaat

SEQ ID NO: 1939 - DNA, 16 bp, Artificial Sequence
  Synthetic oligonucleotide
ccacctataatggtga

SEQ ID NO: 1940 - DNA, 16 bp, Artificial Sequence
  Synthetic oligonucleotide
aacccacctataatgg

SEQ ID NO: 1941 - DNA, 16 bp, Artificial Sequence
  Synthetic oligonucleotide
ttaaacccacctataa

SEQ ID NO: 1942 - DNA, 16 bp, Artificial Sequence
  Synthetic oligonucleotide
atttaaacccacctat

SEQ ID NO: 1943 - DNA, 16 bp, Artificial Sequence
  Synthetic oligonucleotide
cccccaagaacttcat

SEQ ID NO: 1944 - DNA, 16 bp, Artificial Sequence
  Synthetic oligonucleotide
gttaaagtgacaccat

SEQ ID NO: 1945 - DNA, 16 bp, Artificial Sequence
  Synthetic oligonucleotide
atccaagcaattctat

SEQ ID NO: 1946 - DNA, 16 bp, Artificial Sequence
  Synthetic oligonucleotide
ccctcaaagaaataga

SEQ ID NO: 1947 - DNA, 16 bp, Artificial Sequence
  Synthetic oligonucleotide
tattactagactatac

SEQ ID NO: 1948 - DNA, 16 bp, Artificial Sequence
  Synthetic oligonucleotide
ctattactagactata

SEQ ID NO: 1949 - DNA, 16 bp, Artificial Sequence
  Synthetic oligonucleotide
ccattagctgggtaaa

SEQ ID NO: 1950 - DNA, 16 bp, Artificial Sequence
  Synthetic oligonucleotide
cagaattggctcaaat

SEQ ID NO: 1951 - DNA, 16 bp, Artificial Sequence
  Synthetic oligonucleotide
ttaatatgcaggtaga

SEQ ID NO: 1952 - DNA, 16 bp, Artificial Sequence
  Synthetic oligonucleotide
aacctaataggttaat

SEQ ID NO: 1953 - DNA, 16 bp, Artificial Sequence
  Synthetic oligonucleotide
gaagtatagtaaaact

SEQ ID NO: 1954 - DNA, 16 bp, Artificial Sequence
  Synthetic oligonucleotide
agccaaaagcagtacc

SEQ ID NO: 1955 - DNA, 16 bp, Artificial Sequence
  Synthetic oligonucleotide
tagaaagtatccctgt

SEQ ID NO: 1956 - DNA, 16 bp, Artificial Sequence
  Synthetic oligonucleotide
ggttatactaccaagg

SEQ ID NO: 1957 - DNA, 16 bp, Artificial Sequence
  Synthetic oligonucleotide
acaggtttgtatccct

SEQ ID NO: 1958 - DNA, 16 bp, Artificial Sequence
  Synthetic oligonucleotide
agtcattagtacagtt

SEQ ID NO: 1959 - DNA, 16 bp, Artificial Sequence
  Synthetic oligonucleotide
ccaagtgtaggtttag

SEQ ID NO: 1960 - DNA, 16 bp, Artificial Sequence
  Synthetic oligonucleotide
agtaaagtaaggttaa

SEQ ID NO: 1961 - DNA, 16 bp, Artificial Sequence
  Synthetic oligonucleotide
gtataatggtatagca

SEQ ID NO: 1962 - DNA, 16 bp, Artificial Sequence
  Synthetic oligonucleotide
taacactgtagtacga

SEQ ID NO: 1963 - DNA, 16 bp, Artificial Sequence
  Synthetic oligonucleotide
tatagatggatcaatt

SEQ ID NO: 1964 - DNA, 16 bp, Artificial Sequence
  Synthetic oligonucleotide
agccctaaacaaattg

SEQ ID NO: 1965 - DNA, 16 bp, Artificial Sequence
  Synthetic oligonucleotide
gtaaagtgatatatga

SEQ ID NO: 1966 - DNA, 16 bp, Artificial Sequence
  Synthetic oligonucleotide
ctctttttatgtcctc

SEQ ID NO: 1967 - DNA, 16 bp, Artificial Sequence
  Synthetic oligonucleotide
attagtacttctgagg

SEQ ID NO: 1968 - DNA, 16 bp, Artificial Sequence
  Synthetic oligonucleotide
cctaaaaatctcttat

SEQ ID NO: 1969 - DNA, 16 bp, Artificial Sequence
  Synthetic oligonucleotide
aagtattctttcatac

SEQ ID NO: 1970 - DNA, 16 bp, Artificial Sequence
  Synthetic oligonucleotide
tacataataacatcag

SEQ ID NO: 1971 - DNA, 16 bp, Artificial Sequence
  Synthetic oligonucleotide
ctttaaagtcttccag

SEQ ID NO: 1972 - DNA, 16 bp, Artificial Sequence
  Synthetic oligonucleotide
attttcaccagtaact

SEQ ID NO: 1973 - DNA, 16 bp, Artificial Sequence
  Synthetic oligonucleotide
taacaaaatactctgc

SEQ ID NO: 1974 - DNA, 16 bp, Artificial Sequence
  Synthetic oligonucleotide
gcacactaattttgtt

SEQ ID NO: 1975 - DNA, 16 bp, Artificial Sequence
  Synthetic oligonucleotide
aaaacaacttgccgat

SEQ ID NO: 1976 - DNA, 16 bp, Artificial Sequence
  Synthetic oligonucleotide
gatcaagaccccaaaa

SEQ ID NO: 1977 - DNA, 16 bp, Artificial Sequence
  Synthetic oligonucleotide
aacgatttttgcattt

SEQ ID NO: 1978 - DNA, 16 bp, Artificial Sequence
  Synthetic oligonucleotide
actaaagttacccaga

SEQ ID NO: 1979 - DNA, 16 bp, Artificial Sequence
  Synthetic oligonucleotide
ttaaagttagcctgta

SEQ ID NO: 1980 - DNA, 16 bp, Artificial Sequence
  Synthetic oligonucleotide
aaatactagagaccag

SEQ ID NO: 1981 - DNA, 16 bp, Artificial Sequence
  Synthetic oligonucleotide
tatgtaacgcattata

SEQ ID NO: 1982 - DNA, 16 bp, Artificial Sequence
  Synthetic oligonucleotide
gtccaaagggaccagg

SEQ ID NO: 1983 - DNA, 16 bp, Artificial Sequence
  Synthetic oligonucleotide
aaccctcccacttttg

SEQ ID NO: 1984 - DNA, 16 bp, Artificial Sequence
  Synthetic oligonucleotide
aaagcattctttaacg

SEQ ID NO: 1985 - DNA, 16 bp, Artificial Sequence
  Synthetic oligonucleotide
acaagatgtattctaa

SEQ ID NO: 1986 - DNA, 16 bp, Artificial Sequence
  Synthetic oligonucleotide
caacacatcaaatacc

SEQ ID NO: 1987 - DNA, 16 bp, Artificial Sequence
  Synthetic oligonucleotide
ccaaagtatcattcta

SEQ ID NO: 1988 - DNA, 16 bp, Artificial Sequence
  Synthetic oligonucleotide
gaaacaaagcactcca

SEQ ID NO: 1989 - DNA, 16 bp, Artificial Sequence
  Synthetic oligonucleotide
ctcaactattatctga

SEQ ID NO: 1990 - DNA, 16 bp, Artificial Sequence
  Synthetic oligonucleotide
ctttaagaacaactga

SEQ ID NO: 1991 - DNA, 16 bp, Artificial Sequence
  Synthetic oligonucleotide
tagcacacaataattt

SEQ ID NO: 1992 - DNA, 16 bp, Artificial Sequence
  Synthetic oligonucleotide
ataagaaacttaggtt

SEQ ID NO: 1993 - DNA, 16 bp, Artificial Sequence
  Synthetic oligonucleotide
taattaacagcacagg

SEQ ID NO: 1994 - DNA, 16 bp, Artificial Sequence
  Synthetic oligonucleotide
ttggaagccaataatt

SEQ ID NO: 1995 - DNA, 16 bp, Artificial Sequence
  Synthetic oligonucleotide
tacgccaccagctcca

SEQ ID NO: 1996 - DNA, 16 bp, Artificial Sequence
  Synthetic oligonucleotide
ctacgccaccagctcc

SEQ ID NO: 1997 - DNA, 16 bp, Artificial Sequence
  Synthetic oligonucleotide
cctacgccaccagctc

SEQ ID NO: 1998 - DNA, 16 bp, Artificial Sequence
  Synthetic oligonucleotide
gcctacgccaccagct

SEQ ID NO: 1999 - DNA, 16 bp, Artificial Sequence
  Synthetic oligonucleotide
cttgcctacgccacca

SEQ ID NO: 2000 - DNA, 16 bp, Artificial Sequence
  Synthetic oligonucleotide
cagctccaactaccac

SEQ ID NO: 2001 - DNA, 16 bp, Artificial Sequence
  Synthetic oligonucleotide
ccagctccaactacca

SEQ ID NO: 2002 - DNA, 16 bp, Artificial Sequence
  Synthetic oligonucleotide
accagctccaactacc

SEQ ID NO: 2003 - DNA, 16 bp, Artificial Sequence
  Synthetic oligonucleotide
caccagctccaactac

SEQ ID NO: 2004 - DNA, 16 bp, Artificial Sequence
  Synthetic oligonucleotide
ccaccagctccaacta

SEQ ID NO: 2005 - DNA, 16 bp, Artificial Sequence
  Synthetic oligonucleotide
gccaccagctccaact

SEQ ID NO: 2006 - DNA, 16 bp, Artificial Sequence
  Synthetic oligonucleotide
cgccaccagctccaac

SEQ ID NO: 2007 - DNA, 16 bp, Artificial Sequence
  Synthetic oligonucleotide
acgccaccagctccaa

SEQ ID NO: 2008 - DNA, 16 bp, Artificial Sequence
  Synthetic oligonucleotide
tgcctacgccaccagc

SEQ ID NO: 2009 - DNA, 16 bp, Artificial Sequence
  Synthetic oligonucleotide
tcttgcctacgccacc

SEQ ID NO: 2010 - DNA, 16 bp, Artificial Sequence
  Synthetic oligonucleotide
ctcttgcctacgccac

SEQ ID NO: 2011 - DNA, 16 bp, Artificial Sequence
  Synthetic oligonucleotide
aagctccaactaccac

SEQ ID NO: 2012 - DNA, 16 bp, Artificial Sequence
  Synthetic oligonucleotide
caagctccaactacca

SEQ ID NO: 2013 - DNA, 16 bp, Artificial Sequence
  Synthetic oligonucleotide
acaagctccaactacc

SEQ ID NO: 2014 - DNA, 16 bp, Artificial Sequence
  Synthetic oligonucleotide
cacaagctccaactac

SEQ ID NO: 2015 - DNA, 16 bp, Artificial Sequence
  Synthetic oligonucleotide
ccacaagctccaacta

SEQ ID NO: 2016 - DNA, 16 bp, Artificial Sequence
  Synthetic oligonucleotide
gccacaagctccaact

SEQ ID NO: 2017 - DNA, 16 bp, Artificial Sequence
  Synthetic oligonucleotide
cgccacaagctccaac

SEQ ID NO: 2018 - DNA, 16 bp, Artificial Sequence
  Synthetic oligonucleotide
acgccacaagctccaa

SEQ ID NO: 2019 - DNA, 16 bp, Artificial Sequence
  Synthetic oligonucleotide
tacgccacaagctcca

SEQ ID NO: 2020 - DNA, 16 bp, Artificial Sequence
  Synthetic oligonucleotide
ctacgccacaagctcc

SEQ ID NO: 2021 - DNA, 16 bp, Artificial Sequence
  Synthetic oligonucleotide
cctacgccacaagctc

SEQ ID NO: 2022 - DNA, 16 bp, Artificial Sequence
  Synthetic oligonucleotide
gcctacgccacaagct

SEQ ID NO: 2023 - DNA, 16 bp, Artificial Sequence
  Synthetic oligonucleotide
tgcctacgccacaagc

SEQ ID NO: 2024 - DNA, 16 bp, Artificial Sequence
  Synthetic oligonucleotide
ttgcctacgccacaag

SEQ ID NO: 2025 - DNA, 16 bp, Artificial Sequence
  Synthetic oligonucleotide
cttgcctacgccacaa

SEQ ID NO: 2026 - DNA, 16 bp, Artificial Sequence
  Synthetic oligonucleotide
tcttgcctacgccaca

SEQ ID NO: 2027 - DNA, 16 bp, Artificial Sequence
  Synthetic oligonucleotide
tcagctccaactacca

SEQ ID NO: 2028 - DNA, 16 bp, Artificial Sequence
  Synthetic oligonucleotide
atcagctccaactacc

SEQ ID NO: 2029 - DNA, 16 bp, Artificial Sequence
  Synthetic oligonucleotide
catcagctccaactac

SEQ ID NO: 2030 - DNA, 16 bp, Artificial Sequence
  Synthetic oligonucleotide
ccatcagctccaacta

SEQ ID NO: 2031 - DNA, 16 bp, Artificial Sequence
  Synthetic oligonucleotide
gccatcagctccaact

SEQ ID NO: 2032 - DNA, 16 bp, Artificial Sequence
  Synthetic oligonucleotide
cgccatcagctccaac

SEQ ID NO: 2033 - DNA, 16 bp, Artificial Sequence
  Synthetic oligonucleotide
acgccatcagctccaa

SEQ ID NO: 2034 - DNA, 16 bp, Artificial Sequence
  Synthetic oligonucleotide
tacgccatcagctcca

SEQ ID NO: 2035 - DNA, 16 bp, Artificial Sequence
  Synthetic oligonucleotide
ctacgccatcagctcc

SEQ ID NO: 2036 - DNA, 16 bp, Artificial Sequence
  Synthetic oligonucleotide
cctacgccatcagctc

SEQ ID NO: 2037 - DNA, 16 bp, Artificial Sequence
  Synthetic oligonucleotide
gcctacgccatcagct

SEQ ID NO: 2038 - DNA, 16 bp, Artificial Sequence
  Synthetic oligonucleotide
tgcctacgccatcagc

SEQ ID NO: 2039 - DNA, 16 bp, Artificial Sequence
  Synthetic oligonucleotide
ttgcctacgccatcag

SEQ ID NO: 2040 - DNA, 16 bp, Artificial Sequence
  Synthetic oligonucleotide
cttgcctacgccatca

SEQ ID NO: 2041 - DNA, 16 bp, Artificial Sequence
  Synthetic oligonucleotide
tcttgcctacgccatc

SEQ ID NO: 2042 - DNA, 16 bp, Artificial Sequence
  Synthetic oligonucleotide
ctcttgcctacgccat

SEQ ID NO: 2043 - DNA, 16 bp, Artificial Sequence
  Synthetic oligonucleotide
acagctccaactacca

SEQ ID NO: 2044 - DNA, 16 bp, Artificial Sequence
  Synthetic oligonucleotide
aacagctccaactacc

SEQ ID NO: 2045 - DNA, 16 bp, Artificial Sequence
  Synthetic oligonucleotide
caacagctccaactac

SEQ ID NO: 2046 - DNA, 16 bp, Artificial Sequence
  Synthetic oligonucleotide
ccaacagctccaacta

SEQ ID NO: 2047 - DNA, 16 bp, Artificial Sequence
  Synthetic oligonucleotide
gccaacagctccaact

SEQ ID NO: 2048 - DNA, 16 bp, Artificial Sequence
  Synthetic oligonucleotide
cgccaacagctccaac

SEQ ID NO: 2049 - DNA, 16 bp, Artificial Sequence
  Synthetic oligonucleotide
acgccaacagctccaa

SEQ ID NO: 2050 - DNA, 16 bp, Artificial Sequence
  Synthetic oligonucleotide
tacgccaacagctcca

SEQ ID NO: 2051 - DNA, 16 bp, Artificial Sequence
  Synthetic oligonucleotide
ctacgccaacagctcc

SEQ ID NO: 2052 - DNA, 16 bp, Artificial Sequence
  Synthetic oligonucleotide
cctacgccaacagctc

SEQ ID NO: 2053 - DNA, 16 bp, Artificial Sequence
  Synthetic oligonucleotide
gcctacgccaacagct

SEQ ID NO: 2054 - DNA, 16 bp, Artificial Sequence
  Synthetic oligonucleotide
tgcctacgccaacagc

SEQ ID NO: 2055 - DNA, 16 bp, Artificial Sequence
  Synthetic oligonucleotide
ttgcctacgccaacag

SEQ ID NO: 2056 - DNA, 16 bp, Artificial Sequence
  Synthetic oligonucleotide
cttgcctacgccaaca

SEQ ID NO: 2057 - DNA, 16 bp, Artificial Sequence
  Synthetic oligonucleotide
tcttgcctacgccaac

SEQ ID NO: 2058 - DNA, 16 bp, Artificial Sequence
  Synthetic oligonucleotide
ctcttgcctacgccaa

SEQ ID NO: 2059 - DNA, 16 bp, Artificial Sequence
  Synthetic oligonucleotide
catttatgtgactaga

SEQ ID NO: 2060 - DNA, 16 bp, Artificial Sequence
  Synthetic oligonucleotide
gagtctttatagtaat

SEQ ID NO: 2061 - DNA, 16 bp, Artificial Sequence
  Synthetic oligonucleotide
gatttgtcagcaggac

SEQ ID NO: 2062 - DNA, 16 bp, Artificial Sequence
  Synthetic oligonucleotide
tccatttatgtgacta

SEQ ID NO: 2063 - DNA, 16 bp, Artificial Sequence
  Synthetic oligonucleotide
aggagtctttatagta

SEQ ID NO: 2064 - DNA, 16 bp, Artificial Sequence
  Synthetic oligonucleotide
ttgatttgtcagcagg

SEQ ID NO: 2065 - DNA, 16 bp, Artificial Sequence
  Synthetic oligonucleotide
catttatgtgactaga

SEQ ID NO: 2066 - DNA, 16 bp, Artificial Sequence
  Synthetic oligonucleotide
gagtctttatagtaat

SEQ ID NO: 2067 - DNA, 16 bp, Artificial Sequence
  Synthetic oligonucleotide
gatttgtcagcaggac

SEQ ID NO: 2068 - DNA, 16 bp, Artificial Sequence
  Synthetic oligonucleotide
tccatttatgtgacta

SEQ ID NO: 2069 - DNA, 16 bp, Artificial Sequence
  Synthetic oligonucleotide
aggagtctttatagta

SEQ ID NO: 2070 - DNA, 16 bp, Artificial Sequence
  Synthetic oligonucleotide
ttgatttgtcagcagg

SEQ ID NO: 2071 - DNA, 16 bp, Artificial Sequence
  Synthetic oligonucleotide
ccatttatgtgactag

SEQ ID NO: 2072 - DNA, 16 bp, Artificial Sequence
  Synthetic oligonucleotide
ggagtctttatagtaa

SEQ ID NO: 2073 - DNA, 16 bp, Artificial Sequence
  Synthetic oligonucleotide
tgatttgtcagcagga

SEQ ID NO: 2074 - DNA, 16 bp, Artificial Sequence
  Synthetic oligonucleotide
tccatttatgtgacta

SEQ ID NO: 2075 - DNA, 16 bp, Artificial Sequence
  Synthetic oligonucleotide
aggagtctttatagta

SEQ ID NO: 2076 - DNA, 16 bp, Artificial Sequence
  Synthetic oligonucleotide
ccatttatgtgactag

SEQ ID NO: 2077 - DNA, 16 bp, Artificial Sequence
  Synthetic oligonucleotide
ggagtctttatagtaa

SEQ ID NO: 2078 - DNA, 16 bp, Artificial Sequence
  Synthetic oligonucleotide
tccatttatgtgacta

SEQ ID NO: 2079 - DNA, 16 bp, Artificial Sequence
  Synthetic oligonucleotide
aggagtctttatagta

SEQ ID NO: 2080 - DNA, 16 bp, Artificial Sequence
  Synthetic oligonucleotide
ccatttatgtgactag

SEQ ID NO: 2081 - DNA, 16 bp, Artificial Sequence
  Synthetic oligonucleotide
ggagtctttatagtaa

SEQ ID NO: 2082 - DNA, 16 bp, Artificial Sequence
  Synthetic oligonucleotide
tgatttgtcagcagga

SEQ ID NO: 2083 - DNA, 16 bp, Artificial Sequence
  Synthetic oligonucleotide
ccatttatgtgactag

SEQ ID NO: 2084 - DNA, 16 bp, Artificial Sequence
  Synthetic oligonucleotide
ggagtctttatagtaa

SEQ ID NO: 2085 - DNA, 16 bp, Artificial Sequence
  Synthetic oligonucleotide
tgatttgtcagcagga

SEQ ID NO: 2086 - DNA, 16 bp, Artificial Sequence
  Synthetic oligonucleotide
tccatttatgtgacta

SEQ ID NO: 2087 - DNA, 16 bp, Artificial Sequence
  Synthetic oligonucleotide
aggagtctttatagta

SEQ ID NO: 2088 - DNA, 16 bp, Artificial Sequence
  Synthetic oligonucleotide
catttatgtgactaga

SEQ ID NO: 2089 - DNA, 16 bp, Artificial Sequence
  Synthetic oligonucleotide
gagtctttatagtaat

SEQ ID NO: 2090 - DNA, 16 bp, Artificial Sequence
  Synthetic oligonucleotide
gatttgtcagcaggac

SEQ ID NO: 2091 - DNA, 16 bp, Artificial Sequence
  Synthetic oligonucleotide
tccatttatgtgacta

SEQ ID NO: 2092 - DNA, 16 bp, Artificial Sequence
  Synthetic oligonucleotide
aggagtctttatagta

SEQ ID NO: 2093 - DNA, 16 bp, Artificial Sequence
  Synthetic oligonucleotide
ttgatttgtcagcagg

SEQ ID NO: 2094 - DNA, 16 bp, Artificial Sequence
  Synthetic oligonucleotide
tccatttatgtgacta

SEQ ID NO: 2095 - DNA, 16 bp, Artificial Sequence
  Synthetic oligonucleotide
aggagtctttatagta

SEQ ID NO: 2096 - DNA, 16 bp, Artificial Sequence
  Synthetic oligonucleotide
ccatttatgtgactag

SEQ ID NO: 2097 - DNA, 16 bp, Artificial Sequence
  Synthetic oligonucleotide
ggagtctttatagtaa

SEQ ID NO: 2098 - DNA, 16 bp, Artificial Sequence
  Synthetic oligonucleotide
tgatttgtcagcagga

SEQ ID NO: 2099 - DNA, 16 bp, Artificial Sequence
  Synthetic oligonucleotide
tccatttatgtgacta

SEQ ID NO: 2100 - DNA, 16 bp, Artificial Sequence
  Synthetic oligonucleotide
aggagtctttatagta

SEQ ID NO: 2101 - DNA, 16 bp, Artificial Sequence
  Synthetic oligonucleotide
ttgatttgtcagcagg

SEQ ID NO: 2102 - DNA, 16 bp, Artificial Sequence
  Synthetic oligonucleotide
ccatttatgtgactag

SEQ ID NO: 2103 - DNA, 16 bp, Artificial Sequence
  Synthetic oligonucleotide
ggagtctttatagtaa

SEQ ID NO: 2104 - DNA, 16 bp, Artificial Sequence
  Synthetic oligonucleotide
tgatttgtcagcagga

SEQ ID NO: 2105 - DNA, 16 bp, Artificial Sequence
  Synthetic oligonucleotide
tccatttatgtgacta

SEQ ID NO: 2106 - DNA, 16 bp, Artificial Sequence
  Synthetic oligonucleotide
aggagtctttatagta

SEQ ID NO: 2107 - DNA, 16 bp, Artificial Sequence
  Synthetic oligonucleotide
gctgtgaaactctcta

SEQ ID NO: 2108 - DNA, 16 bp, Artificial Sequence
  Synthetic oligonucleotide
atgctgtgaaactctc

SEQ ID NO: 2109 - DNA, 16 bp, Artificial Sequence
  Synthetic oligonucleotide
gctgtgaaactctcta

SEQ ID NO: 2110 - DNA, 16 bp, Artificial Sequence
  Synthetic oligonucleotide
atgctgtgaaactctc

SEQ ID NO: 2111 - DNA, 16 bp, Artificial Sequence
  Synthetic oligonucleotide
tgctgtgaaactctct

SEQ ID NO: 2112 - DNA, 16 bp, Artificial Sequence
  Synthetic oligonucleotide
atgctgtgaaactctc

SEQ ID NO: 2113 - DNA, 16 bp, Artificial Sequence
  Synthetic oligonucleotide
gctgtgaaactctcta

SEQ ID NO: 2114 - DNA, 16 bp, Artificial Sequence
  Synthetic oligonucleotide
tgctgtgaaactctct

SEQ ID NO: 2115 - DNA, 16 bp, Artificial Sequence
  Synthetic oligonucleotide
atgctgtgaaactctc

SEQ ID NO: 2116 - DNA, 16 bp, Artificial Sequence
  Synthetic oligonucleotide
tgctgtgaaactctct

SEQ ID NO: 2117 - DNA, 16 bp, Artificial Sequence
  Synthetic oligonucleotide
tgctgtgaaactctct

SEQ ID NO: 2118 - DNA, 16 bp, Artificial Sequence
  Synthetic oligonucleotide
atgctgtgaaactctc

SEQ ID NO: 2119 - DNA, 16 bp, Artificial Sequence
  Synthetic oligonucleotide
atgctgtgaaactctc

SEQ ID NO: 2120 - DNA, 16 bp, Artificial Sequence
  Synthetic oligonucleotide
tgctgtgaaactctct

SEQ ID NO: 2121 - DNA, 16 bp, Artificial Sequence
  Synthetic oligonucleotide
atgctgtgaaactctc

SEQ ID NO: 2122 - DNA, 16 bp, Artificial Sequence
  Synthetic oligonucleotide
gtttatgcaatgttaa

SEQ ID NO: 2123 - DNA, 16 bp, Artificial Sequence
  Synthetic oligonucleotide
attgtgctgagcttga

SEQ ID NO: 2124 - DNA, 16 bp, Artificial Sequence
  Synthetic oligonucleotide
ggtgtaacataggtta

SEQ ID NO: 2125 - DNA, 16 bp, Artificial Sequence
  Synthetic oligonucleotide
gtgtttatgcaatgtt

SEQ ID NO: 2126 - DNA, 16 bp, Artificial Sequence
  Synthetic oligonucleotide
agattgtgctgagctt

SEQ ID NO: 2127 - DNA, 16 bp, Artificial Sequence
  Synthetic oligonucleotide
atggtgtaacataggt

SEQ ID NO: 2128 - DNA, 16 bp, Artificial Sequence
  Synthetic oligonucleotide
gtttatgcaatgttaa

SEQ ID NO: 2129 - DNA, 16 bp, Artificial Sequence
  Synthetic oligonucleotide
attgtgctgagcttga

SEQ ID NO: 2130 - DNA, 16 bp, Artificial Sequence
  Synthetic oligonucleotide
ggtgtaacataggtta

SEQ ID NO: 2131 - DNA, 16 bp, Artificial Sequence
  Synthetic oligonucleotide
gtgtttatgcaatgtt

SEQ ID NO: 2132 - DNA, 16 bp, Artificial Sequence
  Synthetic oligonucleotide
agattgtgctgagctt

SEQ ID NO: 2133 - DNA, 16 bp, Artificial Sequence
  Synthetic oligonucleotide
atggtgtaacataggt

SEQ ID NO: 2134 - DNA, 16 bp, Artificial Sequence
  Synthetic oligonucleotide
tgtttatgcaatgtta

SEQ ID NO: 2135 - DNA, 16 bp, Artificial Sequence
  Synthetic oligonucleotide
gattgtgctgagcttg

SEQ ID NO: 2136 - DNA, 16 bp, Artificial Sequence
  Synthetic oligonucleotide
tggtgtaacataggtt

SEQ ID NO: 2137 - DNA, 16 bp, Artificial Sequence
  Synthetic oligonucleotide
gtgtttatgcaatgtt

SEQ ID NO: 2138 - DNA, 16 bp, Artificial Sequence
  Synthetic oligonucleotide
agattgtgctgagctt

SEQ ID NO: 2139 - DNA, 16 bp, Artificial Sequence
  Synthetic oligonucleotide
atggtgtaacataggt

SEQ ID NO: 2140 - DNA, 16 bp, Artificial Sequence
  Synthetic oligonucleotide
tgtttatgcaatgtta

SEQ ID NO: 2141 - DNA, 16 bp, Artificial Sequence
  Synthetic oligonucleotide
gattgtgctgagcttg

SEQ ID NO: 2142 - DNA, 16 bp, Artificial Sequence
  Synthetic oligonucleotide
tggtgtaacataggtt

SEQ ID NO: 2143 - DNA, 16 bp, Artificial Sequence
  Synthetic oligonucleotide
gtgtttatgcaatgtt

SEQ ID NO: 2144 - DNA, 16 bp, Artificial Sequence
  Synthetic oligonucleotide
agattgtgctgagctt

SEQ ID NO: 2145 - DNA, 16 bp, Artificial Sequence
  Synthetic oligonucleotide
atggtgtaacataggt

SEQ ID NO: 2146 - DNA, 16 bp, Artificial Sequence
  Synthetic oligonucleotide
tgtttatgcaatgtta

SEQ ID NO: 2147 - DNA, 16 bp, Artificial Sequence
  Synthetic oligonucleotide
gattgtgctgagcttg

SEQ ID NO: 2148 - DNA, 16 bp, Artificial Sequence
  Synthetic oligonucleotide
tggtgtaacataggtt

SEQ ID NO: 2149 - DNA, 16 bp, Artificial Sequence
  Synthetic oligonucleotide
tgtttatgcaatgtta

SEQ ID NO: 2150 - DNA, 16 bp, Artificial Sequence
  Synthetic oligonucleotide
gattgtgctgagcttg

SEQ ID NO: 2151 - DNA, 16 bp, Artificial Sequence
  Synthetic oligonucleotide
tggtgtaacataggtt

SEQ ID NO: 2152 - DNA, 16 bp, Artificial Sequence
  Synthetic oligonucleotide
gtgtttatgcaatgtt

SEQ ID NO: 2153 - DNA, 16 bp, Artificial Sequence
  Synthetic oligonucleotide
agattgtgctgagctt

SEQ ID NO: 2154 - DNA, 16 bp, Artificial Sequence
  Synthetic oligonucleotide
atggtgtaacataggt

SEQ ID NO: 2155 - DNA, 16 bp, Artificial Sequence
  Synthetic oligonucleotide
gtttatgcaatgttaa

SEQ ID NO: 2156 - DNA, 16 bp, Artificial Sequence
  Synthetic oligonucleotide
attgtgctgagcttga

SEQ ID NO: 2157 - DNA, 16 bp, Artificial Sequence
  Synthetic oligonucleotide
ggtgtaacataggtta

SEQ ID NO: 2158 - DNA, 16 bp, Artificial Sequence
  Synthetic oligonucleotide
gtgtttatgcaatgtt

SEQ ID NO: 2159 - DNA, 16 bp, Artificial Sequence
  Synthetic oligonucleotide
agattgtgctgagctt

SEQ ID NO: 2160 - DNA, 16 bp, Artificial Sequence
  Synthetic oligonucleotide
atggtgtaacataggt

SEQ ID NO: 2161 - DNA, 16 bp, Artificial Sequence
  Synthetic oligonucleotide
gtgtttatgcaatgtt

SEQ ID NO: 2162 - DNA, 16 bp, Artificial Sequence
  Synthetic oligonucleotide
agattgtgctgagctt

SEQ ID NO: 2163 - DNA, 16 bp, Artificial Sequence
  Synthetic oligonucleotide
atggtgtaacataggt

SEQ ID NO: 2164 - DNA, 16 bp, Artificial Sequence
  Synthetic oligonucleotide
tgtttatgcaatgtta

SEQ ID NO: 2165 - DNA, 16 bp, Artificial Sequence
  Synthetic oligonucleotide
gattgtgctgagcttg

SEQ ID NO: 2166 - DNA, 16 bp, Artificial Sequence
  Synthetic oligonucleotide
tggtgtaacataggtt

SEQ ID NO: 2167 - DNA, 16 bp, Artificial Sequence
  Synthetic oligonucleotide
gtgtttatgcaatgtt

SEQ ID NO: 2168 - DNA, 16 bp, Artificial Sequence
  Synthetic oligonucleotide
agattgtgctgagctt

SEQ ID NO: 2169 - DNA, 16 bp, Artificial Sequence
  Synthetic oligonucleotide
atggtgtaacataggt

SEQ ID NO: 2170 - DNA, 16 bp, Artificial Sequence
  Synthetic oligonucleotide
tgtttatgcaatgtta

SEQ ID NO: 2171 - DNA, 16 bp, Artificial Sequence
  Synthetic oligonucleotide
gattgtgctgagcttg

SEQ ID NO: 2172 - DNA, 16 bp, Artificial Sequence
  Synthetic oligonucleotide
tggtgtaacataggtt

SEQ ID NO: 2173 - DNA, 16 bp, Artificial Sequence
  Synthetic oligonucleotide
gtgtttatgcaatgtt

SEQ ID NO: 2174 - DNA, 16 bp, Artificial Sequence
  Synthetic oligonucleotide
agattgtgctgagctt

SEQ ID NO: 2175 - DNA, 16 bp, Artificial Sequence
  Synthetic oligonucleotide
atggtgtaacataggt

SEQ ID NO: 2176 - DNA, 16 bp, Artificial Sequence
  Synthetic oligonucleotide
agtgattaggtcaaat

SEQ ID NO: 2177 - DNA, 16 bp, Artificial Sequence
  Synthetic oligonucleotide
ttagtgattaggtcaa

SEQ ID NO: 2178 - DNA, 16 bp, Artificial Sequence
  Synthetic oligonucleotide
agtgattaggtcaaat

SEQ ID NO: 2179 - DNA, 16 bp, Artificial Sequence
  Synthetic oligonucleotide
ttagtgattaggtcaa

SEQ ID NO: 2180 - DNA, 16 bp, Artificial Sequence
  Synthetic oligonucleotide
tagtgattaggtcaaa

SEQ ID NO: 2181 - DNA, 16 bp, Artificial Sequence
  Synthetic oligonucleotide
ttagtgattaggtcaa

SEQ ID NO: 2182 - DNA, 16 bp, Artificial Sequence
  Synthetic oligonucleotide
agtgattaggtcaaat

SEQ ID NO: 2183 - DNA, 16 bp, Artificial Sequence
  Synthetic oligonucleotide
tagtgattaggtcaaa

SEQ ID NO: 2184 - DNA, 16 bp, Artificial Sequence
  Synthetic oligonucleotide
ttagtgattaggtcaa

SEQ ID NO: 2185 - DNA, 16 bp, Artificial Sequence
  Synthetic oligonucleotide
tagtgattaggtcaaa

SEQ ID NO: 2186 - DNA, 16 bp, Artificial Sequence
  Synthetic oligonucleotide
tagtgattaggtcaaa

SEQ ID NO: 2187 - DNA, 16 bp, Artificial Sequence
  Synthetic oligonucleotide
ttagtgattaggtcaa

SEQ ID NO: 2188 - DNA, 16 bp, Artificial Sequence
  Synthetic oligonucleotide
ttagtgattaggtcaa

SEQ ID NO: 2189 - DNA, 16 bp, Artificial Sequence
  Synthetic oligonucleotide
tagtgattaggtcaaa

SEQ ID NO: 2190 - DNA, 16 bp, Artificial Sequence
  Synthetic oligonucleotide
ttagtgattaggtcaa

SEQ ID NO: 2191 - DNA, 16 bp, Artificial Sequence
  Synthetic oligonucleotide
ggctactacgccgtca

SEQ ID NO: 2192 - DNA, 20 bp, Artificial Sequence
  Synthetic oligonucleotide
ccttccctgaaggttcctcc

SEQ ID NO: 2193 - DNA, 20 bp, Artificial Sequence
  Synthetic oligonucleotide
cagtgcctgcgccgcgctcg

SEQ ID NO: 2194 - DNA, 45408 bp, Macaca mulatta
  misc_feature (14205)..(14224): n is a, c, g, or t
atttctggttactaaaacaatggaatgtattactgttaccaggagtagtcctagttgtagattaccttaggaattatttcagtactatctttattaaattctccttccactggatagggttctgtctattcataccaggtctgaaaaatcctactgtcgctaatggattgggcagcagagatattcaaaggatcggccaccacctgaaaattagtgattaggtcaaatcccattatggtatctgtcagattctcgagccctgaggaaggaagatatagggcattttgatgtgacttaatgggaaaacttcatggagatatccatagcagcagtaaatcttatggttaggggaattagaagtattaaaactgcatcaagtcatggggcatgtggaaggtaggcaggcaagatgacactaacatggaaggagagtcctaaaacgagaatggatattcaaatataaacttcacctcttgcacaattttgcccaagattggcactgaagatggtgtaacataggttaaaaagttagattgtgctgagcttgacaaataagtgtatcctcatgtaaacggaatataaatcacatagttgtaaaaaaactgagagtttgagatgacttcttttaacatgaagaaatggatagtaagtgatgtcctcaaaatcagagtcctaaaagacaactatctagaacctaagtcaccttcttcctagtccagtgatactttcacctcaccatgccatctcatttcatatattttaaaataagtaacattttaaatttatcaaaaggatttttattaatatttatttttaaagcattattcttaaatatggatcagacttgaaaagtgtttatgaaatgttaatttaaccagtgttaagagaactagccaaacctagagattgtaaaactttttcactttattgtttgaaaaaaaaattaatgtcttggcataccacccccccaaaatctcaacttttgagttaatatttaaaagtaatttttaaaaaagagttcattttcttaaaaaacaaaagcaatgctcttgatttgtcagcaggaccaccacagagtgagaatgtatcttgttgacctatccaaactgtcctagtccctccccattttgaccagccaatgcatgacaacactggatgaccacggggacacagtccatgctgtgaaactctctatgaaagctcaaaggttcacacagggcctggccatgcaaccttggtctcttcaacacctactaagctataactggcccaaataatctttaatgtcacaagcagaattaaaactaccttcaaagactgaagttgaagaaaagatttaaagttatactatgaaagagcaatctgacacagggagactacatttaattcctatgagaattttttatacatgttaaaattatttcaattattataaaaatttagtagcatgtaaatatagccccaaaatggttgctataatccccatttcatactgggtctgccttaacaggaaaagctattaggagtctttatagtaatttatctaatgtgaaaaggaaacggccttataatagtttccattgacttgtaatttttttccatttttttctttttatagaaaaaatataatattttggggagagtgaccatgactaatagcagtggaaagggagacaaaacctttgtgaacagtgtaactttacattcatcagggatgacaaactataggacatgatgcctagaagaatcatcaggaagcccataaatttgtgttccctcaatgtttcagtaaaaccaattagaaagtctcaactgaaattataattagtaattaatccatttatgtgacgagataaaacacagaatagggatgattcagaagcttcattaatttgtttcacaccaacattcacaattggtaagaaaaataagaagtaatcaactgcatgcaccaaaaaccccaagacagaaatcttaggtattcagtttctttttcacaggcattgctagttcaaaaatcaaaactctgggaatactggcacttagaggaaaaaaaagcttccactgtcattttaaaataagcatttaaggtaaaagctaacagtctgcatggagcaggaaaaaaattaggtaatgctaaaacaaatgctaataatttagtgtaatgtacaaaaattaccacttttactagtatgccttaagaaaaaagtacaaattgtatttacataattacacactttgtctttgacttctttttcttctttttaccatctttgctcatcttttctttatgttttcgaatttctcgaactaatgtatagaaggcatcatcaacaccctgaaatacataaaaagtattaaaatgtgaatatatacgatggcttcatgtgtataggtaacaaatttccattattaatagaaacaatattaagaaaggattttttatgtttctcttcaggcaactgaatatatattacatatgttagacttttagaattcctaagtcatccgcatagatgtcagtattataaacaggaacactcaatattcacaaaagacaaggataaccaatggcacagaattttaaataaggtaatgactttttcacaggagaacttaatttgctattttttccacattggcaaacctaagtcaccaaaatccaaatgcatgttgtgtgtgtgcacacttaattgtctttatgtttctgaactttagatataagccatgcaactgtaaactgttttcataagtcttcacacacagtaacagtatttgagctctggttctatacttacgtaaaatccattggatttaaaaatttaccaagaagtaaacagtattcgtacatcctattccaataaatttatcaagaagtaaacagtatctaaacatattatttcagttttcaaataatatgtattaagggattagtttcaattcatatatttatcattaagaaaaaggtttaaactgaccccaatacaggagaataccacttaaaaaaaacaaaaacaaaaactaatacctcagatttgtggagaaattagctaaatcatttgaaagatcttatagtttaccaatttggaggagattctctctttatcccataaagttttaatttctgtttaatatattaggtattctaaagcttgccatataaagctaaatatcctgtcttcaaagagtttaacagtcattgtgaccaccatctatttatgactaaagcaaagttatttaaatttaatggctaaaaatgattttaagccataataattttcaacccaatagtatacaatgtgaaaaatggcactctcaaagtggtagaagagatttcaaacctgcaatacttaaattatgcaagatccatacacaagtcaattcttgtcatgtctccaattaaaataaaaaatataaataaaagcaaaaaattaagaaaaaaatatgattctctctgtattttaaagcctgttcaactgagtagtaactataaaaagaaaatctgttaacctcacaatacttccaaacctagacagcagagggagtcttagaaagaaacacccaacacattaagttgtataaatcaagccactttaagaacaataaaaactgggtttttactcattgtaatcccttctgttggatattgtaaactatgtaaataaatatattataaaaattacatgtgtaaaaatattcaagttatattatcttgaaattaatttaaaatgttaagtgggccaggtacagtggctcatgcctgtaatcccaacgctttggggggctgagatgggtggatcacttgaggtgaggagtttgagaccagcctggccaacatggtgaaacccctactagaaatacaaaaattagctgggtgtggtagcaggtgcctgtaatcccagctactcagtaggctgaggcaggagaattgcttgaacccggagaggcggagtgcgttgcagtgagctgagatcgcaccactgccctcgactgggtgacagagcgtgactcggtctcaaagaaaaagaaacaaaaaatgttaagtggtgtatctcttttactgtactactaagatgaaaaatatttcaaaataataaaatttggagcatgaacaatgaaaattggctgcagttagtgaattttcctaatagatctataattcaagaaagcgtgaccaatattttaagagaggtaaacacagaatgggaatgagaggcttgtccacattaagcaaacagcaggataaaaaccagcattatttatttgagcactagtgaataaatgtctccagtaaagtccccaaactgcacttactgatgtttcccagtctctaacatcattactgataccacacaaacatatgcttccgtctctcccaaaggagaaaggaaaagtggtaagaaataatctatcagcaatacaatatcatcaaggtttgattacatatatgtatgtgtatgtgtcccttcaggctaaactctttaacacacagaggggaaaatttccaatgatataataaaaattattctgtagcttgccagcacttgacaatttacttgacagtttagaatcataaacccttagaatgtgatggaatcttaaaagaggatctaatctaactcccttaccgtactgcatgaattaattccctctgatcacatccttatgtaatctactccatttctactacttttacaatgaagaaaaatgccaatggtactaaaatggtaaagcagaaaacaatgaaaaaccatgtgatggatacagagaagacacattttatggtgaaaacatagaatttgataacattactttctaagattctaacaaagattctaggcttctgttgcactgaactctcctctacatcatcttgttaaaattaagtaattttggcctggcacagtggcttacacctacagtcacagcaatttgggaggctgaggcaggagaactgcttgaggccaggagtttgggaccagcctgggcaacacagcaagaacctgtctctatttttaaaataaataaataaataaacaaacagacaaattaagtaactaagttcaatcatgaaggaaatgtcacaacctacacagagcaatgaattctttttttctcttatgagaactaatcattctcacacatacacgtaagtagcccagtaattattttggttacacattatctttttcaggactaagaaaagctaatttatatatgtttgtcattgttaaatgtttgtttgtttatttgctagaggtggggtctcattacgttgccctggctgatcttgaactcctggcctcaagtaatcctcgtgccttggacttctaaagttctggaattatagatgtgagccactgtccctgggccaaagcttttttatttttacttttttttagagatagagtctctttctgttgcctgaggctacagtgccatggcaccatcatagctcccttcaacctcaaactcctggggtcaggcaatcctcctgcctcaggctcccaagcagctgatgctacagactcacacactacagccagcttgtcaaataaatttttttaaattgtatttcatttaaaatttttaattaccaagtatacttctcttttacataaattacttccatgtgtactgaaaaaacaaggaatcatcacatcaaacaactgtgagacattcacctacagtcactgtataaaacataattgtacaaattagaaattttagaatagtatatgcttacacctttgttttaaatataaattagagcataacacttatttcttattttactctaaacagttctatttttaaaatcatctaatggtgagacaataggaggagaaaataaaaacttaaaaccaccacctaaatctggtcatggtactgttatttaaaatgtgtaacttttcaaactgcattgttaaatttgcagtattttagaggttgtggtaaaatttaatatgcaaaattgctttaattgcaaaatactgctttacacaatgatactcaaaaactattaagagttcataaatttcaataaaaattaatgccagtcatactttgtttccgagtttagtaaattagtatgccacataatatatttcgggattgagtctactattcaaatgtgtattttatacttttgtgaaatacctaaaattcatataataaagaacaccaacttgtaataaatataataaatgatatgctagtttttgaaaattgtaatttcattgcctattaagaacatgatatattacaaacaatatgcatccaaagcttaagcttcgccatgaactttatgatacctagtgaagtattttcttagcaagacagagtttaatatgggttggtttagaaatgaaaatgagaattccacacaataaatatttacggggtagttactatgtgccaggaaccttactaggcaatgggcatgcaaagattaaaaatatgtaattctggctaagattttgctgtcaaataatacaggaatgaaacagaagaggttatttcaacataacatgggaagcacataatagctaagaatagtattctgggaatacgcaggaagggctccatgcctagtctaagggtttcaagaaagatttttagagagtaggagactggggaatcatgagagtattagctaattagtaagactagggataaaaatactggcattccaaacaagagccaagactcaaactcaagggaaggtaagaaataacatgttatttatttatagaagaacaaaagaaattcaggcaagatgaagtttttagatataagaccaaaaaagagctggagtggtgggaaggtagtaaggactatctgcgacatgctgtggaacatgagattttatcctatagctaaaatgacttttttttttttttttgagacggagtttcactcttgttgctcaagctggagtgcaatggtgcagtctcggctcactgcaacctccgcctcccaggttcaagtgattctcctgcctcagcctcccgagcagctgggattacaggcatgtgccaccacgtgcggctaattttttgtatttttagtagaaacagcgtttcaccatgttagccaggctggtctcgaactcctgacgtcaggtgatcgcctgcctcggcctcccaaagtgctgggattacaggcatgagccaccgcgcccggctgaaaatgacatttatttaaagtgtatctccctggttgcacaatgaatgatggcagcaactggtaaatcaaataggaggttctaacagtcgaacaagaaatgataggggcctgaattaatgatgacataaaagacacacaatgtaacatcacaggaatttgtggatacttccaaatggggaaccaggcggaaaagagggcagtaggagtcatcctaaaattcccaagtttctcactggaataagaaagtgctgtgctgctgatgccactgagctggagaacttaggcagaagaatggttatttgcttgtaaaatatccaaaagaaaaaatacatttaagagtggctttctcccaccttctggaccattcaatattactgctctctactatctctcatatttttttctcgctacctaacaacaacaacaaaaaaaagctgcttattatctcaaaacttgagtatgatttcccttaaaaataaaggtaaatatcagttcccaaatacttagtttacttaagactcattaaatcattagactttatgccaaatatagattagtctactacagccatcaaaattgtctcaattataattcccactagattaaaaataaatgtactaagtatggaaacaagtttcttatcttttaatacttcaagttagaatactacacctaagtagttctaaagtggttgccaccttgttacctttaaaagatatctgctttctgccaaaattaatgtgctgaacttaaacttaccagattacattataatgcattttttaattttcacacagccaggagtcttttcttctttgctgatttttttcaatctgtattgtcggatctctctcaccaatgtataaaaagcatcctccactctctgcattgtaaaacacaacttctttaaagtctgtttcattggtaagagtaatttactgggacagccatgtgcaagaagtttgagattatgagcttgagatttttttttttttttaaacagacatcagactgtttgaataaaactgaggatgcagttttaaaatatgggctagaatcctggtttgttcttaaaagtcagttttgttttctaatggaattaaatttaaaaatttttaaattaggaattaggagagattatgacaagcctaaacacatttattagcatctgtttgtcaattaatgcaaccattttagtttgctagtcttggaattaaagactaaactgaagttagctttaaattacttctttgacttagggaaaaggtgatttatgtactactgattcccacaccttcccccaggggagaatgagaagaaaaatggtaaaatatggacgtgcaacctttgttaaaaaacaacaaaaacataaaagaatatcaaaataaagatgagtcaagaaactggaatcttgagttttattttaaattttaacaccttccaatctatttccagggtctacaagtaaagctgagactgggtcttctgtacatgtttaactgcattattaaattaaaatcttaaatgagagctgcttaccataatataaaatcatgatgaattaaaggacacacacaaaataggagcattttgtatcgttactacaagctctttttttgttattttttttgttttgttttagagacagggtctcactgtgttgccaggatggagtgcaatggcacgatcatgactgcagcctcgacctcccaggctaggtgatcctcctgcctcagcctctcaaatagctgggactacaggcaagcactaccacacccgactgatttttgtattttttgtagagacagggttttgccatgttgccggggctggtctcaaactcctgagctcaagtgatccgcccaccttggcttccaaagggctgggattacagccatgagccaccaaacctggccttactacaagtcttaaaaataatttttagaacagtgttcaatcatactggctttgtaccttctattctaatttaaatactcttaatagagtttttcctgcttaagcctatgataagaaagctatgacaacaggcacaatcatatactggccatatggagataaaagtttttaatcctttccaatctagaaaattaggcagtcatcaaaggggaaaaggacttccttaactgtgctgctagtttgttcagaaaagcataccatcaaagtaggagcacagagaaatgcacagaaatattaatctatatgtagtgcaaattaaaagatgtaatattgtgtttattattctaaaaggtaggtaaatattttttgaagctggtatattttactccacatttaattttaagggaattctattcttttatcttaaaattaagaatgaattacctaatttggggattggcatacatattttaactttctgagatccgtaacatcaatgtttctactgaaccaaatgtaacaaagtggacctagcacctaaaaagttaatatatcacaagtaccatttgtagttttaaactcaatcacacacagataattggcaactaagtattagctgaagtcaaccaatggctagggcttaatttttgcacacagaagtcatgtgtacatctactgcctgcagtagttacacacctcaattctttaaggcatactaatttttagaaatctcagaagtgtattaagaactgctttagtaaagtacagaaatttacctctaaagtcaaactttaatttaaaattcataatgttaagtttcagttcaaaaagcaggcatttaagtaacgtgattatgtattaaaatgcgtatctcaagtcattaacatataccatccagtgatatatttctatttaataatgaaaatcattatattctaagaacattcttatttttaatggaatcaatttagtcaactagttcgctaagccaagtataaatacaaattttcaactacctttgttggcactttaaattagatacctacttacacctgtatattaaagattttaagtgtcaggtgtggtgactcatgctttagtaccagcattttgagagggcaagagatgccaggagtttgagacctcatctctactaataaattaggcatgttggcatgagcctgaagtcccagctactcaaaaggctgaggcaggagggttgcttgggcccgggagtttgaggcttcagtgagctatgactgaaccattgcacttcagtctgagcaacagaacaagatgctgtctctaaaacaaatttttttaatcgttttacagtttatatttatcattaaccctcaaaaggaaagggtttattatttttacctttgtcttcaaaatattatgtatccaaaattttcattaataagcgacataaaggcactgaagtaactttgtagcatgtaaaatgtaaagcatgagctctgtaagatattttcacaaatgattctctttcaatttgaaaatcaatgtaaaaaatttaaaaatacgtatatacatatacacacacaaaccaggtaaaagctcatattttcataaattttctaagaatgttaacttctattcctgtttaaaaaaaaaaaaagttataaggtcaatgtagaagaaccaaaacatactatgaaggagaaaaacagtattggtcctctactaatttagcagaagcaaattttgattttaacttatttctaaaatcagtttgaatgtgtctacttttgcagcgtcagcatccccaccaccaatagtgaaatacatgatttttgtttccagcaatgcagagagagaattggaagccaataattaaaaagaagagattattatccacaaccaagaattcagtgtcaggacctcagtggttcatataattaacagcacagggtgacttcttccatttcttatttttagtaatgagaaatttaggttttagagtatcagttatttaccacagtttttcagacttagttatttcttcataatatgctttaaagtcatactgacatcaagagaacatgagaacattatccttgtgtacactgtaaaccactggcactggctcttattttttaaaatgcatacagtatatacctatgaaacaaaacactggtttttcacattccgaaatttgtagataatttttaaagataaaatatagctgaaacagatatttaatatccactgactactcactaagctcttaagtggcatacaatgatttttctgagaataagacttgttgccacatatactcattttgtgttttttgtttttgttttttaactttttttttttttcttttgagatggagtctcactctgctgcccaggctagactgcagtggtgcgatcttggctcactgcaacctccacctccggattcaagcattctcctgcctcagtctcctgagtagccagaactacaggcatgcaccaccacgcccagctaatttttgtatttttagtagaggggggtttcaccatattgcccaggctggtctcaaactcctgaccatgtgatctgcctgcctcagcctcccaaagtgctaggattataggcatgagccactgcgcccagcctacttttgtttttatacacatatactcattttcaaatgtcacttattgaactttaagaacaactgaaaatacgtgggaataaaagtatacaactttaaatacgtaaattttttaaaatcaagagactgacgacattttcaactcaactattatctgaaaacatacttgtgaggccatggaaacaaagcactccataaagagaaagaaccgttaaccaaaagtattctaaatcttgctaggctatgcttttactaagagattttgtttaagtaagtttttgttcctgttgaatctgcaaattcttgcaaaactctgtcaaggaaacaacacaccaaataccctaactatatacagatgtaagactaccagccttttggggcagaagggcatggaggaacaagctgtattctaaaacccaactgtgtgcatccctgactttctcaagaaaccttgccacccacagcctatctcatgtactattgaaatgcagaaaaaccactacttgggagactaccatggtgcacaccaagtgcacagtaactgttctgtcaatttttaactcataaaaagctaaagtgcaaaatattgatctcatgtaggcaaactcaactactattaaacagagacacagcacataaggaggttgtattgcaaagccttctttaatggagttcttctaacaattaatttaaatacctagaaattaacaacaaacccaggaaattaatcactcaacatttttaggttcgtaaaactaattttcacattatacttaaattgagacccccagaaagcaaaaaagccagatgaggagtaatagataccccaaagactgcttctgtcattcaccttactgaaccttcccacttttgattttagcagactggaaaatacacaattctcatggtatcaatgtttcaattttgatagcttttgccaacatggccatgcactgtccaaagggaccaggaaaatctgtcaacaacccagataaatgtgaactaggtaacagtccttatacactaggaacatagggaccacacaatgtactagcagaaaataactctatttgcctttcagatatggactgaactgagtgtaaagaatatgtaaggcattatattctagtcaagtaattagctttttaaaatgataagttattaacttggtaaaaatatatattctgcaattcttgtcttaaaaagtacaccagggcacagtggctcacgcctgtaataccagcactttgggaggccgaaggaggcggttcacgaggtcaagagattgagaccatattggccaacatggtgaaaccccgtctctactaaaaatataaaaattagctgggcttggtggtgtgcgcccatagtcccagctactcaggaggctgaggcaggagaattgcttgaacccaggaagtggaggttgcagtgagccgagatcatgccactccactctagcctggcaacagagtgagactctgtctcaaaaaaaaaaaaaaagaaaagaaaaggtactaggggccaggcacagtggctcacgcctataatcccagcacactgggagactcagatgggaggatcacttgaggtcaggagttcaagaccagcctggtcaacatggcgaaaccccgtctctactaaaaatacaaaaattagtcaggtatggtggtgcatgcctgtagtcccagctgctcaggaggctgaggcacaagaatcgcttgaacccaggaggaggttgttgcagtgagccaagatcctaccactgcactccagcctgggtgacagagggagacactgcctcaaaaaaaaaaaaaaaaaaaaaaaaaaaagagtactagggtaaaatctctatttccttttcatgaaatatgtaagttttactttaagattattaaggttagcctgtaaaatacaaaggtttaacctaacttctagtatctaatcaaacactaaagttacccagagaattaggaatcagtatactacagcccataggccaaatgcagcaacagcttttttttttttttttttttttttttgggggggggggccccccgtatcccacaatatgggagcttccggtgcgttagatcactttcttctctttgggataattattgaaaataaaagggtgttctttccattgaaactcgtgccaaatctgcttcactgtttagcagctgaaattattgcaaggtttgtgttcacttttgggtcataacctcttatcacatttccctggacttctctatatgtgtgacgtcttttcacttcttgtgtgcaaaagtctgcattttaaagactagtaatggcacattccctccctcccctctccaccctgaatgccaaccagcatgagggctcatctgccttgaattctgcagcttagtcacggcctctagtgagaaatacgagactaagctatggccttgggagtgggccacagtcctctgtttcaagcattcgcnnnnnnnnnnnnnnnnnnnnagtagttgggaatacaggcacccaccactatgcctggctaattttggtatttttagtagagacggggtttcaaccatgttggtcaggctggtctcgaactcctgacctcaggtgatgggcccacctcatttctgggattgcaggcatgaaccacagcacacggccagcctatttttatactatgcacaagctaacaattagttttgcattttaaagggttataatttttaaaaaaatgcaacagataccacttgtggccctcaaagcctaaaacatttactatcttggccctttacagaaaataagtttgccagcctctaatttacacagatgagaacttctaaatgaatgttttgttcctttaacctgaatataattttttgggagtgtttacgtgttttagtctcatgatcaagaccccaaaaattagggcataaaacaacttgctcataaaatacaacaaggatatgcacactagttttgtttaaaaaacaaataagggctgggcgtggtggctcatgcctgtaatcccagcactttgggaggccaaggcgggcggatcacaaggtcaggagatcgaggtcatcctggctaacacgggaaaccccatctctactaaaaatacaaaaaattagccaggcgtggtggcgggcgcctatagtcccagctacttgggaggctgaggcaggggaatggggtgaacccgggaggcagagcctgtagtgagccgagatcgtgccactgaactccagcctgggcaacaaagcaagactctgtctcaaaaaaaaaaaaaaaagaataaataaataagctgaataacagataagtaacaaaatactctgcagaaaggagggcttgacatttcaccagtaactggagatgtaacatttattaaaatttccatatttcattttataatctctacagttacttggaatagctctttaaagtcttccagaagcatgcaaatatcaaattaatttcaatagaggaagattaatagacttttgaaaggcaaattaatttctaggcaaatcaacaagtccatttaataataaaaggaaatcaaagaatagaaattaaatatctaatttatagtttagcagcataaattatataataacatcagtgaaacaggatataaaagaaaggttgagtgctctgttaaggagtacaagtattcttttatactacatccctccatattttaattagatgatccacatataaatgtctacaaagcaaatttaagttcatctacttacgtattatataccttccaaaaaacaaatcaaaacaaaaaactcaaggccacagaactgtaaaaaacctaaaaatctcttataaaaggaagccagatagttttctgatcaaatatgaatgctgtgttgtattaaagtattaaggtcaaatagcaagaaccaattagtacttctgaggtagtaatcatacaatcaccaaaaaggagacacagctattttaggatcttatcaaatgagaagtggacagcaacaaagtgggactaacaagactctttttatgtcctctactgcttttctactcaaagtatggtccaagtaccaagaaaaataccacctgggagcttatcagaaatgcagactgaatcccaacctaaaccttctgaattagaatctggattttaataagcccagctgatttgtatgcataagaaaatataagaagcacttctttactgcaaccccttaaaacattatgcaaagtctcttaaattttttctttttttttgtgaaatgtaggctaatatgttcagtagtatgaaaagcatcttttaaaagttacaagtaaagcaaatatagtaaaacaacaatggtagaatctaggtagtatatttgcaaatgttttaaataaaacttaattttgtatttgaaaatgtttcataagaaaacattggaagaaaaagtaacaaatcatgtattctcagtatcttctgtcctaagaaaaatcaaggagactggttatagaagaccagtaaaaagaaaaacaaaaacaaagcctcttcctagtctttaggacatggaaatggatttaagtgaaatcttaattcctctaaagtaaagtgatatgatatataccaattttaacctataaatgaagttttagtaaaactgccagagaaatttgtatactggtcaaactagcgaaatttagtttttaatcccccaaaaatgactcgaagtagaatttttttctttactatgtatcaaattcgtataactaggaagaggtacatatgctctcctactagggaaatataacatatatattagctggataatgatttacatttacatttttgcacctttataaaatttgataaacttctagaatgcttgtttttatgtttaacaacgtaaaagttgttcatccattttttttaactcctagcattacagaaattctacaaaactggttttctaggctcacaggtaaatgtaaccagaaaaagccctaaacaaacttatggaatatagatggatcaatttcttagtacagtcatgtgccacatgacattttggtcaacagtagattgcatatgtgatagtggtcccataagattataatggagtttaaaagttcctattgcctagtgatgttatagccatcctaacattgtagcacaacacattactcacgtgtttgtggtgatgctggtgtaaacaaacttaccacactgccagttgtataatggtatagcacctacaattatacaccatacttaatacttgataatggtaataagtgactattactggtttatgtattcaccatactatttattgttattttagtgtactccttctatttacttaaaaaaaaaaagttaactataaacagccttggataggtccttcaggaggtattccaaaagttattataggagatgacagctccatgtgtgttactgcccctgaagaccttccagtgggacaagatgtggaagtgaagacaatgatattgatggtcctgaccctgtgtaggcctaggctaatgtgcatgcatgtcttagtttttaacaaaaaagtttaatgagtaaaaaaaaataaaaaatgttaaatatggaaaaaaacttattacagaataaggatacaaagaaagaaaaattttgtatagctgtataatgtgtgttttaagctgtattacaaaagtcaaaatgttaggaaaaattttacagtttatttaaaaagttacaggaaagtaaggttaatttattactgaacaagaaatttaaaaaaaaaataaacttagggtagcccaagtgtatatttatacacacaaaatttaccattgtgttaacaattgcctatagtcattaccacagttacacaccgtacagatttgtatccctggggcaagagactgtactatatatcccaggtgtatagtaggttataccaccaaggtttgtgtaagtatactctatgatgtttgcacaatgacaaaaatcacctaacaatgtatttcttagaaagtatccctgtcattaagagacatatgactatatataacaattaattccttcctatctttatgtattcatttcctgtatgttaaactcttcatacaaacaggttaaataacactaactgaaattattttattttacctaaagaaaaagtcatttttaaaacaaagatgatttttgaaacaaaattccctctgacaacaatttttgtcagaaaaatgcattaaatgaataacagaatttctatttgctttctgggtattttctttctttaatgagacctttctccaaaaataaacatatcctcaaaaaaattctgccaaaataaaattcttcaaatgcaacaacatttaacctagaaacacgacataatggtttaaaagtactactgaaatagaaaattcaaaaatgtgttgccttgttctttgtgtgtgtttgtatatatatatatatatacatatacaaacacacaacagtgggaaaaaaaatccccacatctcttgaattctaaatgttaacatgtgctcagaattgaagagaaattttcaatgtagaaagaaaccaaagccaaaagcagtatcaaggacactgtaagaagcaatgccctctcaagagacaaaaacatttactaaatacatattgttttatttcctagtatagcataattgagagaaaaactgatatattaaatgacataacagttaggattttgcagaaaatagatctgtatttatttcagtgttacttacctgtcttgtctttgctgatgtttcaataaaaggaattccgtaacttcttgctaagtcctgagcctgttttgtgtctactgttctagaaggcaaatcacatttatttcctactaggaccataggtacatcttcagagtccttaactcttttaatttgttctctgggaaagaaaaaaaagttatagcagaggcattagtaacacaagtatctttcaaaacctgtccataacttttgtcataaaatttgggtgaaagaaaacaatgtaattcctggtttccactataccaaattttccttccttcctttactaattatttttttctttacctttttaaagagaaaccttgtctctctctcacaagatcaaatacctagaagtatagtaaaactataacctaataggttaatatgcaggtagatcataatagtaaaacagaaactactgaaaaattctagacccaaagtgctatataacagactataattttagaaacatatgttaaatgcgtaaagataaaaaatatttttacaaaaacctgaattaaagcattaacataattttcatattactgtctcaaaaaacaaagttgacaagtagattttgatttctaggtagaaaacactgaagttactacaccacttattccattaaaagcccttctacatgttaatcattttcaatataacaagtgcataaactctaaatttggggtgaaattatattccctcacaattttaggtgactttcaaagatgcagcacaaaagaaggagcagagcagacaagagagtcagaattggctcaaattcccagttcctccactattagctgggtaagcttggataatagaggtgaaatttggtaactcctctataaaaatactaccactaccacccacccgaatgtcttctgctctattactagactacacagtaaacatgctataacaatgttcttaaataaaatgttaaacttcttataactaggctaactcattattacatgacatagccagtgagtaatttatttgcctaatatgtagttttaggaaaactaaaccctcaaagaagcagaatataaaatagtacaataatgattattttaatagttttatgcagctttgtcagatttaagaaaactgtaatgcccgaattcttcaatctttcaaaacttttattttttaaaatgtataatgccactctttatccaatccaagcaattctacactatacacacgattgcttttaagaatgttaaagtaacaccatctcaaatcaccttttcatattcttttttatggttttcctttttaatgatgcatctaaaaagtttaaagtcttgctttttcagtgtagaagagtcaagagtacagaaggttgtggagtcaaacaggcctaggtttgaatcccagcacaccactactgatgcagtctggagtaagctactccactgctctaatcccccaagaacttcatttataaagcagggatattacctacctcacaaaaattattttaatatttttattagatattatacgcatggcattagcaaagactcaataaataaaaactataattactccttaatgtcaacttattatattcaatttaaacccacctataatggtgaatatcttcaaatgatttagtattatttatggcaaatacacaaagaaagccctccccagtcctcatgtactggtccctcattgcactgtactcctcttgacctgctgtgtcgagaatatccaagagacaggtttctccatcaattactacttgcttcctgtaggaatcctgagaagggagaaacacagtctggattattacagtgcaccttttactttaaaaaaggtgttatatacaactcaacaacaacaaaaaatccaatttaaaaacgggcaaaggacttgccaaagacaatgctccaaagatgacggacagatggccactaagcacctgaaaagctgctcaacatcatcaatcgtcaggaaaataaaatcaaaaccatgagatgctaccacatacccattagaattggctattattaaaaaacaaaacaaaaacactcaaaaaacggaaaataagtgttagcaaggatacagacactgaaatctttgtgcattgctggtgggaatgtaaaatggtgatgccattgtggaaaacagtggtagttcctcaaaaagtcaaacacagaattaccatatgatcagtaaatccattcctaaatatataatcaacagaaccaaaaacagggactcaaacagatacctgtacaccgatgttcgcagcagcactatttataatacacaaaatgtagaaataacttatgtgtctgttaacggatgaatggataaacaaaatgtagtatatacatacagtggaacattattcagccataaaaaggaataaaatttcatataggttgagcattaatgcaggttaatccaaaaacctgaaatccaaaatgctccaaaatctgtaacttttagagcctgacatgatgctaaaaagaaatactcactggagcatttgattttggattttttttttccttcatcttttttttttttttggagagatagggtcttatgttgctcaggctggtgttgaactcatgggctcaagcgaacctcctgccttggccacccaaaatggtgggattacaagcatgagccactgggctccatctgattttggatttttggattagggatgctgaaccagttaagtatctacaaatattccaaaatcaaaaaaaacaaaatctgaaatccaaaccacttctagtcacaagcattttgggtaacggatgcttcaacctgtatttacatgctacaacacagatgaaccttaaaaacattatgctaaatgaaataagtcagacacaaaaggacaaataccacataattccacttatatgaggaacctaaaacaggcaaattcaaaaagatgaaaagtagactagagattaccagggactgggggagggagcattactggggactacttaacaggtatagaattctagtttgggatgataaaaaaagttctcaaaacagatggtgctaatggttagacaacatggtgatggttgcacaacattaatgaacacacttaagatcactgaagtgaacacttaaaaataactaccatgggccgggcgcatcacgaggtcaggagatcaagaccatcctggccaacatggtgaaaccccgtctctactaaaatacaaaaaataggcctggcgtggtggcatgtgcctgtagtcccagctactcaggaggctgaggcaggggaattacttgaacccgggaggtggaggctgcagtaagagattgctctactgcactccatcctggcaacagagcaagactccgtcttaaaaaacaaaacaaacaaaaaaaaaactaccatagtaaattttatgttatgtatatctgaccacaagaaaaaatgtttttaaggtattatatggagagtcaacaatgcgagtgtacatattggtaacaaaaagttatcgacaaaagaaaataatttcaaaaatgggatagctctaccaactctattattgaagatgatttaaatgacaagaaaaatcaatcaacttataaataattgtcatgcatctattttatttattgtcaaaggcatacataaggaaatggtcaatactcaagattctaatgccctcatccacctctgaaaactggaaaaaggaatctaacagccagatggatatctctaaagagcaatactgtttcatctgcaaatcctgagggacctctttttttcttttctaaaaagagaaagagagagctgcaactataagattgagtaacagaagggagtgggtaacattaacagaatcttgaaataaaaatctgattttcttccgacttttggctaatacttctgcctaagatttcacacattctgccaaaacagtcctcaaaaaatacggtaaagggatgttacaatgtgaagccatgaaataagaggtagggctaacaacaggtataaagcataaacataaaaacaattattttcttaatgttccacatgtgggctatagtattaatgtatcttttgttgttgttgttgttgttctgagatggagtctcgctctgttgcctaggctggagtgcagaggcgcaatctcagcacactacaacctctgcctcctgggttcaagcaattctcctgcctcagcctcttgagtagctgggattctaggcgcatgccaccacgtccagtaatttttgtatttttttttttttagtagaaatggggtttcaccatgttggtcaggctggtctctaactcctgacctcatgatccacacgccttggcctcccaaagtgctgggattactggcatgagccactgtgcccagcctctaaagtatctttagttcatgaattactctgtagaccattctatcagagggagaaaaagagaaagaaagaatggtcattacaaatgttgttagtaaaatatttcaaaatgtttacagtataaggagaacataaagatgtaagtgcagcatgatcacaataatacgtatttatataaatgtattatgtatttaaaaattggttaatatatacatcaaaatgttataaaggttatgtctttgatggagataatttaaaagacatttatctcggccgggtgtaatggctcacacctgtaatcccagcacttttgtaggccaaggtgggcagatcacctgaggtcgggagttcgagaccagcctgaccaacatggagaaaccccatctctactaaatatacaaaattagccgggcctggtggtgcatgcctgtaatcccaactactcgggaggctgaggcaggagaatcacttgaacccgggaggtggaggttgcagtgagctgagattgtgccattgtactccagcctgggcaacaagagcgaaactccataaaaaaaaaaagacatttatctcttgcttatctcttttctttgtactagatgctatgttaaatatgtttttctttggttttcaattttttaaagtgtgaaaacctaccatattagactataatattgtgcttatcttttaaagcatatggtattttccaaactgtctacaataaaatttaattatctcaccagtcagaaaaaaaggacggctattttattttctaaataagaggctctttagtagagatttgagcattcagttgacatttacttattttagcctattctcttaattaaatacttgaaagaactcctacagatcataaatcaaaaacctgcactccagcctagcatgttccacatgtgggctatagtattaatgtatcctttttctgttgttgtttgttcattctaaagagtaatgaaaaagcaggaggtgggagcaaagtacagagtcttagagtcaacccattacccaggcatggctacgcatgttaagctgaccaaagacttttcctacctattgctgccaccttacattcttttttttgttttgttttgagatggagtcttgctctgttgtctaggctggaatacagtgacatgatctcggctcactgcaacctctgcctcccgggttcaagcaattctcctgcctcagcctcccgagtagctgggacgacaggcacatgccactgtgcccagctaatttttgtatttttagtacagatgaggtttcaccatattggccaggctggtcttgaactcctgacctcaggtgatctgcctcggcttcccaaagtggtgggattacaggcatgaaccatcgcgcccagcctgtcacctcacattctttacttaccaaggtaggctgaatatccctactctgaaaaaccaaaatccaaaaatacttctgggtcctaagaatttcagataaagaatagtcaacccgtaatgtgggatattagcagtttatgcacatatttcataagatgcttccatggtgattaaaccagtgggaccgagaaactgggaaagcagtcccctattcactgatatatctcattcctattatcttttccctaccagaccttaaaaatatcgatagcaatgttctgagacacattcagtttcaaagtaatctacaacctactcacaaacaatactgttgattagaaataaaaggtttaggttaaaaactcagtattttagagttaattttaactagggtacttattcttagaagtgcaattagtcactgagctattttcagcgcaacttggtaaaaactaaagaagaaaaagtgttaaatgaaatatgatctaaaaagaactgataatataaagagaaaacgaatgcaacaaaaattatatattaataaagattctgttccaacttcaggtcaggccataagaaatagtcatcccctggtatacacagggcattggttccaagaccccccagcctccagtcctacagttggcccaggaacatctaggtatatgaaaagtcagccctccatatctgcatttggttgggaaaaaaactgtgtaagtggacccatgtcattcaaacgcatgttgttcaagggtcaactgtacttggagggacaaaaaagctatgcaccaatgtagactctttcaaaaaaatcagagtgtaaataagggttcagcaagctactgcccacaggtcaaaccttgcccactgtttttgtattgcctactagctaggaataaatagctgtttaaaacaacaaaaacaaaaacccaagactatgtgacaaagactcatatggccctttacagaacagtttgccaagtcctcctgtaagttaataactcttcacatatttgaagtattctcaacacatattattcattctctttatatatttttttaaatttgccactctgaggaagtactggttatgaaaaccaaaatgattttaaaacacggagattctataatgaaactatttaataatggagcaaagacaagtatgaaggtattacgtttttaattagtgtttccagcctttcaaaaaagtaaacttttaaattaggtacataagttaccaaagttactaatttgtagccttacgaaactaggataaaataaagtaacttaaactaactcacaataaaatattaaatgaaggaaagttattccccatagtcccctcactcccagctaaaatactattttttccatctacgtaagtaataaaaaaaatttctaaatgaaatgtactatactgccaagactgaattgtagacagaagtcaaacatttctggtgatataataaataagcacaatattcttagaaagcaattacagtatttatctaaagaaagtcattcaaatgttcatagcctttgacacagtaatgccgctatgggaaattatgctaagaaaatatgtgtttttttattaaatgacagttataaagcgattcttaacatggcatcctaaaacgtcttacaaagaaaatttacctaagcatttaaaactgacctacaatcttgcaccatttacctatcttcaaaatatatcctacatccaaccacctaccaccaccatccccctagtccataactattttgtctcaggcaatctgcagcaattgcttcctagcaggtatccctgctattaatcttacaatatattctccacacagcagcaagtgatagtttataaatgtaggttagggccaggcaccacgatagtttataaatgtaggttagggccaggcaccatgatagtttataaatgtaggttagggccaggcaccacgatagtttataaatgtaggttagggccaggcaccacgataatttataaatgtaggttagggccaggcaccatggctcacgcctataatcccaacactctgggaggccgaggtgggtggatcacccgaggtcaggagttcaagaccagcctggccaacatggtaaaatcccatcaaaaacacaaaaaatacagaaaacaattagtcaggtgtggtggtgcatgcctgtagtcccagctacttgggaggtctcaggtgggaggatcgcttgagccaggaataaatgaatgaatgaatgaaggttagatcatgtcattcacttgctcaaagtcctccaatagcactcttcagtcttaaaaataaaaatgcaaagcattcctccttccctggtacctcctatgtttccttcatagcatgtattatgatttgtaattatgtatttactcgtgaaattgtgtaagtctatatcccctactaggctttaaactccatgatggtaggactcacgcctgttttactcaccactacacaccctctacctaatagtcttgaacactataggcaatcagtactgcctcttaaataagtgaatgaatccattcaatgtaaatatatgtagatactaaaaaataaatggaaatttttattacaattaaacagttaacataaacacaatttaacagatttttcaattatgtaatacaaatccttctcaaatagtctgaagatactacatatttgaaatgaacgctcacaacaaatgccccactttcaatgtaatagtttgcaaaggtggattttttaatctttcaacaatttgttttaaaatctatgtcgcaatgttctcttatcttaggaaaacaagcataggttttagatactataaattttaccaagacaatgaagctgttaatttttaaattacaacatatattaagaataatttaataaatcttaacttcaattcaattgtatataacatgtaaagttttatgtaaaaatacaatcaaaacaatacacacagagattttaatacacttatgggagggaagagagtaagactagggaaaagaatgtaggagtcttcaacagtattaacttttctatcttggaaaaaaaaaagagctaaaccaaatacagctaaatgttaaaatatgacagagctggctggtacacacatgaagttcattataccacttttctataaagcactaagagtgcacccattttatcattacttaaggattgtgtatttttactttaaatttctgttggtttgaaaagctacaaatctttattgctttcataccaatttatttgaggagtaataatgttatataggtttctttttcttatcttcatatttattgccaacgtgtgtcctttgcccatgtggaattttaatcttcttttacactgatttgcatattaatgaagtgtttcctggtttactaaatgcctttattttgaggaatttaaaagctaactcattcaagataagataacctcattaaccagaacatcaagtttgtcatttttctattataattaataacaaaattattcagtgtgttcaccttttaacatactcgagtatgggttttctaactcaggcagtgaccctgacaccgaaagacatattccatgtatcaaaacaaaacaatatatacattccaagtatagattttgtttactatattgtagtaaacgaaaaatctaaagaaactaataacttttactaaaggtaatcatattactattaatagcaattacaggagtcaacatttactgagcccttacttatatgccagatactgtcataagcatattacaaacatcatcccatttgatctccaccttcgtgctgccaattccatgagatgctcttctcagcatgactagaactgctgaaaatgtcaataatgtattacttggtgatttccttttgaaactgtaagttttcttgatgtattaagtattctaagaacttttcacatactgcttaataacaactgtagcaaaagatgagaaacttttactcaactaatgctcaagtactttaagttactcttctgaaaggttatttaaatccattatagaatgatgtgttccacacttttagtttataagccatcaaagactgttgtagactgtcagaattataacagggaagaaacaggcaatttagggtatgtaaacagaggttgatgagttcattcccacctacccacatcagtctcccttgtatcatagaaacacttattgaaaatctaggtgtcacattctgtgtcacacattatatagtttctgacctcaagcaactaaggtgagtggaagagacatgaacataaataaataattaaaataaaatgaatgtaacaccatatgcaagacaaagtacaatggtggcacacaggagagatcaacttgtatgaattaagatgggaggggagggacattccaagcagaaaggagcaaagagaatgtaaaatacatagaacaacatgttgaggacacagaaccaaggagctccatataactttagcttagaacagcagtccccaacttttctggcaccagggaccggtttcgtggaagacaatttttccatggacaaagtcagggtgttttcgggatgaaactgtctcgcctcagactatcaggcattagattctctaacaagtatgcaacctagttccttgcacgggcagttcacaacagggttcacgctcctatgagactctaatgccaccaatctgacaagagccaaggcaagtaatgctcacccctccttccggctgtgcagcccagttcctcacaggccacaggtgggtaccagtctgcagcctgcggtttagggatccctggcttagaggccttagaataagcaccaagaagtgaaactggacaatcaagcagaggccagtttatggaggatcacgcgtatcatattaaggagttttacactttatcccatacaaaatcactaaaaggtttttaaaataggaagggagatcagattcactattagcatttttatgacaaattatagaaagggacaaaattttttggcccttcccagacactgcctcatcgtacccactcagatgcaccagtagcagccaaaggcaccacctctgcagggattaagcctcagcgacaacgggcccctcctctgagattccagttctgataacccccaaatcttcccagcactccctgaatcttaggagtagtggccattcttgatgttactgtgttacttcagtgtttttttgcctttcagtcttccaacatgtaattagttctccatgctgaaatatctagtgtggtttctgctttctggactagacttttgacttctataaatgttaaaaatgggaggaaatagagagaagaaggggggagagaaggaggagagcagagactgggagatgatctaggaattattacaagaaatgacaaaacttgaactaaggcagcaacagcagtatggatcgaggagattaaatagattggagaaatactcaggtaaacttgttggtaggaatgtaagtagtacaatcactgtggaaaacaacttggcagttcctcagaaagtcaaagacagagctaccatataacccaccaattccaccttagatatatacccgagagaacggaaaatatacggtcacacaaagacgtgtacataaatgtttatagtggcattattcaaaatagccaaaaagaggaaatcactcaaatgcccatcaaatgaacagataaacaaaataaggtatatccatataacagagtattattcaaccagagaaaggaatgatcaaaaagcaaaaacatagatgaaacctgaaaacatcatcctatgtggaggaagccagacacaaaaggccatgtactgtatgattctctttatatgaaataatcagagtaggcaaactcacagagacagaaaaattagtggtttttagaggctggtgggagaagggattgggtagtgactgctaatggatgtgggacttcttttggggtgattgtaacattctgaaattagtagtaatgactgcacaacccgtgtgaatatactaaaaaccacatacacttgaaaagggtgaattgtatgctatgtgaatacatttcaattttttaaaaataacagagtttactgacaggggatgagtacaaaggagagagcgaagttgaaaagatgagtgatactgggcatgttgaattccctatactcatgggttgtcctggtgggtatgacctgcaggcagcttgatatacatacgtgtctggtgctcaggacagaagtccaggctagagacagacttgggagtcttcaatctatggacagccaaagaacttcacttatttgtgctatgggcttgggcaaactactttatctcacatcttctctaagctattgctccttcagctgtgaaagtaggtaaaaaattgcataaaggattttatacatagattagtattaaacaccatgaaaatctctttataaaatggaaagtgctataaaaagttaactgcattattttatatactacacgcagacacaaaaagtaggggcatgccactggctactgggaactgcttagaaacagtatcttgtccttacaaaatcattgggcatctatagttaaaataattttgcaggccgggcgcggtggctcaagcctgtaatcccagtactttgggaggccgagatgggtggatcatgaggtcaggagattgagataatcctggctaacatggtgaaaccccgtctctactaaaaaatacaaaaaactagccgggcgaggtggtgggcgcctgtagtcccagctattcgggaggctgaggcaggagaatggcgtaaacccgggaggcggagcttgcagtgagctgtgatccggccactgcactccagcctgggtgacagagcgagactccatctcaaaataataataataataataataataataataataattttgcaaaactggtcaccatatttcaaaataaatattatggagctggacaaatcaaagggaaggagagctaaaactgaaggttatgaaggatttctattttgattagggagtgaagatgttaaagagctcattttcatggcagaattttcaattaaaaactaagacattcactaaaaataaggataaagaaaacaaagacttctttaccaaatgctggatacttaaaattataagaatggtgaacattagtttagcactagagagaattaaatgtgtactactcccaagagaaaaaactagttcaaaaatctgaatgatctcaaggaaaatttatatgacaaactttgaaaataagcatataatgagcatacatatgtaacctgttgaaatcacgtggcattcccccacaagtgatcacttgaagtctaggtaagaatgagaggctggaatgaccatggatccaatcttaataattacagctgccaatataatgttcatattttatattatatacctctcagatattatttatttagccttaatagcaatttccttaatccaagactacgtgtgaattatctaatttattgaggcttgaaaaagaagcatgaaataatctaatggtatctgaaacttttctctctccaaaatgagtatttacttttcccccagctccaacagtataagcttatgttaaaaaactaaaacactacaaaaaatgagggagtaattttgtttttagatgaaatcattctcaacacaaggtgctgtgacccagcttcacttacataacggacattcttgaacgtcagtgtatttaaatctacctaatctttccaacaactatgttacttatatgtacaaagataccataatttattcacccattctctattggtagacatgaagattatttccatttttttaaaatcatgaacaacactacaataaacattcttatatacattttaaacatttacgcaattaaatccttggataaattccaagaagctgaattatctggtcaaaggacatgtagtttacattttgaaacatatctctagactgattcagtctgagggtctatactcccagtacagtgcaaggcgcacatttctccttacccttcctagcagttatcattttaaccttagccaatatgaaagtacagaaatgttatttattgtttgaatttgtatcatattcatgaagtgtctttttatatgtttatgttatttattttatttctttttttggtagataagctatttatatctttagtacccccatcccttttttctatttgtgtgtttgtttttttctaattcatatataagacagcttcctgttacatgaaccaaatggtttttctaggttttcatttgtcttctatctttgttaaagataacttaatttttatgtggccagatagctcaatttttgcccaaatgtttgccttaatggtttaagaatactctgataacgagaaaagattctcacttttctcaagggagaaaaatacttaatccaaattccacaaataaggaaacctaaagttaagtcactcaatctatgttacttagataatactacaagatccataatttaagaacgacattatcatttttatttcacaagtgtataatttagcagtaaaatttacacaaggagaaacagggtagatccatggttctcactgtgggagaaagaaggtgaagaacagttaactcttgatttcttaaaaacatgcatttctgagctctgtgccttgaaaagggtctagaagcagtgacaccccattgtcactatataaacacattatataaatgcacctaagacccagatcttgatttctaaacaccattccccactaaaaggaactagggatccttagacaaatggctgaatccagggtggggacaggaaaagaacaaggtgaacctggaatacacagtgccagaaagcatgaagaaactaaaaaactgaaggggacatgttaaaagcatacagaagccagtttaaaagggattccattggccatatcaaaacaaatttgagcaacaaaatcagtaattacaataacagacttcaaacacattaaattaaagagttcatgaatccatactgatacaaacaaaacaaaccaaacaaataaataagggaagagaagagaaaagagagagccctttttaatggcagatgccaattaattaatcgagaagtgatgacagagttagaagattaccattttgcaaccattaaggtagtaataatgagtggatgctaaatcctactggatgcaaatatattggacaacagggcatttacagtctccaagtatctccccacagagtacttattaattataaagcaattaaaggcaactttgcagagagaaatctgatagatatcaccttaaccaaaaaatcaatgttaccaataatgggacaaaccaccatgacgtgcctcctgttgtgatacaaggcggaggacacgacatcactatggagcattcctgcccaaattgtttaacctaaatctgatcatgaggaaaccatcagacaaacttaaactagaggacattctacaaaacaattgacctgagttctttgtaaagtatcattgtcataaaagacaaaagctgagaaatggttctagattaaaacagacggagacaagacaactaatttttgatcctgaatcagaaaaaaaataagtaactgctaaaaggacattcttagaacaactcacaaaattttaatacagaccatatatgagacaaagtattgtataacaatgttgaatttcctaaacttcatcattatgttatagctatacaagaaaatactgtagttatacaaggaaatattcctgttgttggaataaggtcagccaactttttctctaaaggtaaaaagtctataaagatctaaagatagtaaatatttcaggcttttggtcattttggctgcaactactcaactgtgccactgcagtgtgaaagcagccatacacagtatgtaaacacacatgcatggctgtgctccaacaaaatcatataaaaaaagacagcaggagggcaggagtggttgctcatgcctgtaatctggcactctgggaggccaaggcgggaggatcatgaggtcaggagtttgagaccagcctggccaacacagtgaaaccccatctctactaaaaatacaaaaattggccaggcatggtggtgggcacctatagtcccagctacttgggaggctgaggcaggggaattgcttgaacccaggagtcagaggttgcagtgagccgagactgcgccactacactccagcctgggcgacacagtgaggctctgtctcaaaaaaaaaaaaaaaagacagcaggtaggatttggccagcaagcagcccatagtttgcagacccctgtcttagaagttataccaagtttagtggtgaagggtcacaacacgtgcaatttaatcttaaatagttcagcaaaaataaagaatatacattcacataagtgtatacctatatacacagatgaatagatctgtgaaagcatagagaaagcaactatggcaaaatgttagtgaatctagtttaagagtaacagctattcgctgtactatttttttactacttttctataggtttgaaattttttcaaaataaaacattgaaaaaaagtatctaaggtagttactgtgtccctccttaattctttcaaatattttattttcactatttctgcttttttttttttttggagatggggtctcgctctgttgcccaggctggagtgcagtggcgtgatctcggctcactgcagcctccacctcccgggttccaaccattctcctgtttcagtctcctgggtagctgggattacaggcatgcgccaccacacccaactattttttgtatttttagtagagacagggtttcaccacgttggccagggtagtctcgaactcctgacctcgtgatctgcccgcctcagcctcccaaagtgctaagattacaggcatgagccaccacacctggcttatttctactaatttatatggtaagatcccaataatttaactcttccataatgtacacattatgaaataataatggttaagagacgcaagaaatgtaatattcttaagtataaagcctctaaattaagtcatacataattagcatgattgcctagaaacattgctcttcaaaataaagttggccatccatatccacgggtaccccatctatgaattcaaccaagatatctgatgatagaagatatctgaggaaaaaaattcatgaagttcccaaaagtaaaacttgaatttgccatgtactgactactatgttgaacccacacaaatgaactaatgtgaggcactgtaataggtattataagaaatctagagatacctaaaactaataagctccatgaaggcaggaatctggtctgtcttaggcctcagtgtatgcctaatccataagaagactgcatggtacaaagtggcagtgaagaacatttctgggattaaggaattagctgtattgttaaaaccagaatcttaggagattccaaaccataaaatcattttttcctttcacttatttccattacccacttccatttgtatgtttataaagctttggatttataaaaacccaaggtataaaaaaccatgaccagtaaagttttatattcaggtctaaataaatacttattcttaatttgacctaaatatagtacctaactaatacacacggtaatgtttatattaatattagcagaaagtacaactgatactttaagttttttaaaatcaatcatataaaataagacttttaaataaaacagatatatttataaattgatgacacccatagtttaaatagggaaactacccaaacttaggatttcattgttacttgttataaagcaaagaatttgaccagtagagggcactcacaaaagtggggagagcttcacagccttgaagagaagtgacataaaattgctgtgtgtgtctgattttaaaaacagaatgttttaatagaacactggagtaagctaacatattattaatttacaaaaggtaaagtttaaatctttgttatgcttgaaaatctgacataaaccttatgtcagggacatgaatttgacaatttaaaggatgtttaaagctacagtttaacatagcaaggtttggaccttaacactattgaggtttggggtcagataactctgttgtgggggctttcctgtgcactgcaggaagtttaatactaggttggtgcaaaggtaattgcagctttgccattaaaagtaatagcatctactcaatacatgccagtagcagccctctctccccaagttgtggcaaccaaaaatgtctccagatgttgccaaatgtcctctggagggcagtcacccaaccatccttcactgatgactacagatatatgtataaactcaaaagaataacagcttacaaatcacataaggcttttcttataccactcttcagtgtcagtttaattttacaaattttctccctataatctacatacttcattcgtaggtaaaatgaattctataatgaacatggaaaaacaaaagaaactgaaaactgataaaccttggtaaataaatactctacagctcacaacactaaagatgaaacaaaccaatccaattattaatctggtgttccttactgaataggaaactgttccatcaaagaagcacataatacttgaattgaatcataagcgccacaataaaagcatgcagatgtcaaacaattagagcctgggaaaaaatacatcttgctatatttattctcactagcatattatatacagtagatacttaatatatacttggtaagtgatcaactaatcattctgatctctgtaactacctacatttttttaaaatgagactcttcctgttccacccaattttaccttagaaaaaaaatttcagggttttcatagtaagacagcctcaaatacaaacgtactccatctatgtgtcatgcctgaatgattttacatcatatctctgccactaagttgccattagatagtaggctaagttcaaattttgatatattgacaaatctgaattagtctccataagtaaatattttcttaacttgaaaaacagctgattctcagttttaaaaagttacacaagagtatagtggaaatttaacttagtctcagagaatttaaattcaaatcccaccactcattagctacgtatccttaggtgagttaccacctctcagatacattattgaaagaaacaataggccgggcgcggtggctcacgcctgtaatcccagcactttgggaggatgagacgggcggatcacgaggtcaggagatcgagaccaccctggctaacatggtgaaaccccgtctctactaaaaatacaaaaattagccgggcgcagtggcgggcgcctgtagtcccagctacatgggaggctgaggcaggagaatggcgtgaacctgggaggcggagcttgcagtgagtggagatcgcaccactgcactccagcctgggcgatagagcgagcctccgtctcaaaaaaaaaaaaaaaaacataaagaaacaatagccaccctcctcactacctcttagtgtaaattttgcaaaacctaagtcaccaaaaaatatagtattatttgatttaaatttttaaaaaatgtatttccatcttaaatgtagaaaaactgctaataattccaaaatgtgcagtcatatcctttctaattttctctctgacccacactgattggtgaataccaatcaaaacctacaatggcagtgaaatccccatatcctcctaaatttttaattttttacaataacatggagtcagcatttccattcggccaactattaaactactaagttctcttgcctctcctacagtttacaccaagaatttaatgtaatacgtcagttccctcagagactcactgtaacttgggagataacagataatctcagataccttttcccaggtgactaaactacgtcagggaccgtcagtttcaaagttcacaggtaatcaatgcttcccacagtcaagtcttctggtttggcagaaatcataatcagagttataggtttaagtttataaactttttcaaccttccccacaaataaagtcttaactgttagctttgtttcttcaagatttatactgcattttaacaatcgttagcaaaaggtgtcctaacccactttatcatattcatgacgtcatgctatatatacactcatatagcattcatgacctctgattggaaacaaagtgtaatggaatttctcagattttcaggaaagacagacagcatttccagtaaaactaccttccaaaatcccaggaaaactttcatgcataaagtgaattctattaaaacttccttttacatctgatttaaatagtagagtctgccaagtaaccctgaatttgcaatacagattgaaatgggtgcactattcaaacctcctcaaagaaacaaacaaaactgtagtatacattgaattaacttgtcaaaagtaaatatacagagactactgcataggcagtctacttcaattagactgttcccctttactgttgtaaattctcagaattggaagccaaataaagttgtttctatgtttaaatcaaatctttgcaaacaggcattatttcttcacttttttatagtaccaaaaataagtgacatttccctatgattagttatctaatcaattctccaggttctaaactgcatacacatcttcccaaggccaccaatgccctcagaacttgccccagtgcaaagtgtttcctcaagacattacacagtacagtaccttaatagggcactttgacctgttctagatttcacagcttgggacttcaagaaagttctcagaaatttttcagagccaatttttttaaactagtacatcagatgtagaataaatgctaaaggattaggactgcttaatcaagggtaaagaagcctcagaaataatcttacaatatagggctatttcaaagacaaggtgatatgcttattttccatctccactgatgttaaatttaacatgaagattcaaattacgtgtgaaatatgctaataagtatgttctgaaaatgggttaacaaggacagttggggaatgtcccctcctgcaggtctctgagattaaataaatcctcatctgcttgggatggaagggaattctactacctgacctctcaaggtctcttacaggtctttacttattctgctgctggcctttactttggttacttttcattaaactaaaaaaagctgaaaataatcctcaaaacataataatttaaatttagtcaaggaattttttttttaattctagcatttccttgagtaaatttaaaaatgacaacaaagcaaacgtaaagttggtaatagcatctttatataaatcacaccttaggcaaagaattcattttttaaaatttatcaggtagtcgtaggttctctaatgttgagaagaagataggaaaatactgctaatgaagtttaaaaaaatcaaccatcaaacaattacatttcactagtacaattaaatctaacctttacatatgatgtcataataccaagaaacccataaaaataaaagttacattaaaaagattgcctttcaggtacagataggatacaaatttctaccctctcacaaaacgctgaaatatacttccaagcaaaatgcacagagagtgaacatcatggaccctgacatactcccaaggaaaggaaagctctcatattaatggttacatataacttgaaacccaaggtacatttcagaaaacttaaagtaactttcagtataattatcttgtaataagtactcatgaaaatggtcagagaaacgtttatttgtaccaaagaatggtcctgcaccagtaatacgcataatattaaaacaagatttacctctattgttggatcatattcgtccacaaaatgattctgaattagctgtatcgtcaaggcactcttgcctacgccaccagctccaactaccacaagtttatattcagtcatttttcagcaggccttataataaaaataaggaaaatgtgactaaattagaacatgtcacacatgaggttaatacactatcaaatactccatcagtaccttttaatacaaactcacctttatatgaaaagttatttcaaaataccttacaaaattcaatcatgaaaattccagttgactacagatgtgtattgtaatgaactgtacttcatttacaaactcctccatcaacgtttaagaaaaatacctaactgctgcatagatagttcttttatctttaaattcaagttgttgtatctaaacagccacactgctgttctgcagcggctaaaggctctcaaaggatcatgacttcactcatgcaagtgtctagaacagtcctctacaccctgtagacacgccctcacaaaagttgctgacagctatctccactcctattgttagttctccaagtgaacccccacctctaagagttagaagtcactatgcaacagctacagaaaaacttttaaagcatcatggcagtaactctcttggataagtattaacagtaagaatcagatgagggttgggagaatgagtatcaaagttggattgtgtcatggggaaataaaaatttaaacactaaggcagaagaacaatatttgatgacattttaatgtgtgaaatatctctggggaaaatagaagtcggaggttgcagtgagctgagatcgcaccactgcactccattctggtgacagagcaagactccgtctcaaaaaaaaaaaaaaaaaaaaaatctctggggaaaataaaggtaaaaactaagagaactccaaattaactattcagtccaggtgatgtgatcatcaatcacaatacataatcctgtatcactgctgcacataaaaagataaagattagaaagccaggtgcagtggctcatgcctgtaatcccagcactttcggaggccacggcgggtggatcacctgaggccaggagttcaacaccagcctggccaatatggtgaaaccccatctctaccaaaaatacaaaaattagtcaggcgtggtggcgctctcctgtagtcccagctactcaggaggctgaggaaggagaatcgcttgaacccgggaggcggaggttgcagttagctgagatggagccactgcactccagactgggtgacagagtaagactctgcctcaaaacaaacaaacaaaaagattagagataaacactgtttttagtaaaacagttgttaagagatgcaagtgaatatgtctcagtaatccacatgactgttactctttgcttttcctacaccgtctccccacaggtgcatgaatactgacaacttgtataacaagcaccacacagaaaataaaatatagtttctagtcagttgttgcaaattttttgaaataatatgaatgtttaatttcatctcctttccctcatgtaacacataattacaaataaggagagaaatgcaggaaaaaacgggagtaaatgtacaattatttattatggatgagtagctccatataatgaatgtgcatgtaatgtagataaacactaaataggccgggcgtggcggctcacgcctgtaatcccagtactttgggaggccgaggtgggtggatcacaaagtcaggagatcaagaccatcctggctaacacagtgaaatgccgtctctactaaaaacacaaaaaaatcagccaggcgtggtggcgggcacctgtagtctcagctactcgggaggttgaggcaggagaacggtgtgaactcaggaggcagagcttgcagtgagccaagatcatgccactgcactccagcctgggcgacacagcaacactccgtctcaaaaaaagaaaaaagaaaaaaaaccactaaatatacaccgtatcctatttactgaaaaccaaaaataataatttggttttccaaatgataacatactaaccttactcctaagccctgcctcaaaaagcaccacaggctagaaaaattgtgtcacacacagtcacagtacagttccccgccttactctgttctacctagacttactggctgcttgtcgagggtcagttaacaaccactacaaacatatatcttatcctatttgcctccatgctttatttcaaatgtaggccaaagcaattaggaatggatgaggagaattacactaaaatgtatcctctagctctctgcctatcccaacctccccccaaccagtttgcatagcctaaaacagttctcaaaaggtggtctaggaacccctcaggttactaagacttttctggtatgcaagaggtgaaaactgttttcatagtaacattaagatgtcctttacccttttcactcccattcattcacaagttttccagatgtgtgatcataatagattgaatgcagatgcagatataagaatccatgtcttctattaagccacatcattaaagagatttaccaaagtgtgaaacgacaccactcttctaagttttggttttgttttggaaaatagttatttttcataaaatattttattcatgttactaagtaatgggcttattatttctatttttaaatgaattaatacatttttaaaaaatttttttaatttccaatatgataaatattaataaaccccacacaaatcaaaggtttttttaattctcaatttttttttctttataacaaggtctcactacgttgagcacgctggtctccaactcctggcctcaagcgatcctcttgcctcagggattacaagcaagagccaatttgcccggccccttcaataataatttctaagagtgtaggcccggtatggcggctcacgcctgtaatcccaacactttggcaggtttaggcgggcggatcacctgaggtcaggaggccgagaccagcctggccaacatggtgaaatcccgtatctaaaaacacaaaaattagcccggtgacgggagcctgtaatcccggctacacgggaggctgaggcgggagaatcgcttgagcctgggagtcggaggtggtagtgagccgagatagcgccactgcattctggcctgggtgacagagtgagactcactctctcaaaaaaaagaaagagcgtagaggggtccttaaggccaaaaagtttaccagcctagtaaatactgtggacagacactggattagagtttgtgtatatgtacgaattcacagccacatatatcttctggtttacttgtttatgcggtggttgtttccagaaaaaaaaaaaaattctttgaatgagatttttaaaaccaagtcacatttaaatccactagagagaactgggctccaaagtagtcttatcaaatgaagatcatgggctgggaggagctcccttactcacagttagaaaagctaataaggagtggactggactcaaatccaacaattttgttatggaagaaaattcatttttatttgtcataaaacggaattaccatccactatctcttaaaagcaagtacactgtgtatggctacagtctcaaagtaaactaatgttagcaaccatatttgatatctgtagtctatcacatgtaggagtcagcattttggaccttagtcacttcagtgacaccagttatatggttaattctgagctgataattacaaatagacctttcccctttatcacttagtttttaaatgctattataaacataacgtatatattgtataacaattagaaaacctttctgttttgatagagctcaagatttaagaaggcttagacttcagctagaagatgcataaggcactttgggaggccgaggtgggcggatcacgaggtcaggaattcgagaccagcctggacaatatggtgacacccctgtctctatgaaaaatacaaaaaattagccgggcatggtggcagacacctataaacccagttattcgggaggctgaagcaggaggattgcttgaacccaggaggcgaaggtggcagtgagccgagacggcgccactgcacttcagcctgggcaacagagcagatggagaccatcctggccaacatggtgaaaccccttctcaactaaaaatacaaaaattagttgggcacggtggcgggcgcctgtagtcccagctactcaggaggctgaggcaggagaatcgcttgaaccctggaggcagaggtttcagtgagccgagaccacgccattgcactccagcctgggcgacagagcgaggctccatctcaaaaaaataaaaaaggagatgcacatgtttaagtctatttcaggcggttagctggtggattgctacaattcctctgtaagtttaaaaaatcatgtaaaaaaaatcacgttaagtgctgttttggagtactgtaataactcgtgagatgtagaacacatctgcaaaatgaggatattatagaagaaataagggatgagagtaatacataagaaataaggggaaggacaagaacaggtaaattaaacttcaagtactatttttgctattgctgtctacactcaactagcaagaaaaaagccttgcttctgctctgcgggttttcttcggggtttaacttgaccaagcaaaacagaccttctgggattaactttttccttttcactgtaggtcacaggttctacgtgtagggtgttggccacctgttcttccaccatctctacctccacctcctcctttgtggccacagcaatgtcacagcccatacatgggggaggggagcagtcaggaactcggaggcagatgcatttttttccaaacacaataacctccaacagtggtctctaagcactttcctacgctcttccaaaacgtgacctcgcctcttactcacacatcccctacacacggaaaaggaccactatcccgtccatcctgcgctcgagggagaagtttataccttcgtcctagagatgccaaatgcagcagggaaggctggaccgaggcagccgagtgctgggaagggaggcaagaggtgcgggagcggggagagggggaggggaggccggggcgcagcgggagtaacctccaccgcaccccaccgccccgaggggcagccggcccggcccgagtttctccccagcagcctcc
